(19) United States
(12) Patent Application Publication
(10) Pub. No.: US 2015/0329603 A1
(43) Pub. Date: Nov. 19, 2015

(54) Compositions and Methods Related to Parasites

(71) Applicant: CALIFORNIA INSTITUTE OF TECHNOLOGY, PASADENA, CA (US)

(72) Inventors: Erich M. Schwarz, Ithaca, NY (US); Yan Hu, San Diego, CA (US); Igor Antoshechkin, La Crescenta, CA (US); Paul W. Sternberg, Pasadena, CA (US); Raffi V. Aroian, San Diego, CA (US)

(21) Appl. No.: 14/711,386

(22) Filed: May 13, 2015

Related U.S. Application Data
(60) Provisional application No. 61/992,455, filed on May 13, 2014.
(60) Provisional application No. 61/992,481, filed on May 13, 2014.
(60) Provisional application No. 61/992,639, filed on May 13, 2014.
(60) Provisional application No. 61/992,650, filed on May 13, 2014.

(51) Int. Cl. C07K 14/435

(52) U.S. Cl. CPC C07K 14/4354; A61K 39/00

(57) ABSTRACT

In some aspects, the invention relates to compositions and methods for preventing or treating a hookworm infection. In some aspects, the invention relates to nucleic acids, peptides, proteins, antigens, and cells that encode, comprise, and/or express one or more hookworm amino acid sequences, e.g., for use in manufacturing a vaccine.

### PRIORITY CLAIM

[0001] This application claims priority to U.S. Provisional Patent Application No. 61/992,455, filed on May 13, 2014, U.S. Provisional Patent Application No. 61/992,481, filed on May 13, 2014, U.S. Provisional Patent Application No. 61/992,639, filed on May 13, 2014, and U.S. Provisional Patent Application No. 61/992,650, filed on May 13, 2014, each of which is hereby incorporated by reference in its entirety.

### GOVERNMENT INTEREST

[0002] This invention was made with government support under R01 GM084389 & R01 AI056189 awarded by the National Institutes of Health. The government has certain rights in the invention.

### SEQUENCE LISTING

[0003] The instant application contains a Sequence Listing which has been submitted electronically in ASCII format and is hereby incorporated by reference in its entirety. Said ASCII copy, created on May 8, 2015, is named CTH-01701_SL.txt and is 732,956 bytes in size.

### BACKGROUND

[0004] Hookworms (Ancylostoma duodenale, Necator americanus, and Ancylostoma ceylanicum) infect one-tenth of the human race, causing chronic debility. The drugs currently used against hookworms are only partially effective, making new drugs highly desirable. Although effective vaccines against hookworms would be an even better way to lower their abundance, there currently exist no such vaccines.

### SUMMARY

[0005] In some aspects, the invention relates to a nucleic acid comprising a nucleotide sequence encoding an amino acid sequence comprising at least 10 consecutive amino acids encoded by an open reading frame in any one of SEQ ID NOS:1-540, and a promoter operably linked to the nucleotide sequence, wherein the promoter is not a hookworm promoter. The nucleotide sequence may encode, for example, the amino acid sequence encoded by any one of SEQ ID NOS:1-540, or the nucleotide sequence may encode an amino acid sequence with at least 95% sequence homology with the amino acid sequence encoded by any one of SEQ ID NOS:1-540.

[0006] In some aspects, the invention relates to a method of transforming or transfecting a cell with a nucleic acid described herein.

[0007] In some aspects, the invention relates to a cell comprising a nucleic acid described herein.

[0008] In some aspects, the invention relates to a method for producing an antigen, comprising incubating a cell as described herein under conditions sufficient to express a nucleotide sequence as described herein, thereby producing the antigen.

[0009] In some aspects, the invention relates to a method for preventing or treating a hookworm infection in a subject, comprising administering to the subject a composition comprising an antigen, wherein the antigen comprises an amino acid sequence comprising at least 10 consecutive amino acids encoded by an open reading frame in any one of SEQ ID NOS:1-540. The antigen may comprise, for example, the amino acid sequence encoded by any one of SEQ ID NOS:1-540, or the antigen may comprise an amino acid sequence with at least 95% sequence homology with the amino acid sequence encoded by any one of SEQ ID NOS:1-540.

[0010] In some aspects, the invention relates to a method for preventing or treating a hookworm infection in a subject, comprising administering to the subject a composition comprising a nucleic acid, wherein the nucleic acid comprises a nucleotide sequence encoding an amino acid sequence comprising at least 10 consecutive amino acids encoded by an open reading frame in any one of SEQ ID NOS:1-540. The nucleotide sequence may encode, for example, the amino acid sequence encoded by any one of SEQ ID NOS:1-540, or the nucleotide sequence may encode an amino acid sequence with at least 95% sequence homology with the amino acid sequence encoded by any one of SEQ ID NOS:1-540.

[0011] In some aspects, the invention relates to a peptide, protein, or antigen comprising an amino acid sequence comprising at least 10 consecutive amino acids encoded by an open reading frame in any one of SEQ ID NOS:1-540. The amino acid sequence may comprise, for example, the amino acid sequence encoded by any one of SEQ ID NOS:1-540, or the amino acid may comprise an amino acid sequence with at least 95% sequence homology with the amino acid sequence encoded by any one of SEQ ID NOS:1-540.

### DESCRIPTION OF THE FIGURES

[0012] FIG. 1. Overview of search strategy for identifying drug targets specific to multiple parasites, exemplified with a specific application to the hookworm Ancylostoma ceylanicum.

### DETAILED DESCRIPTION

### Definitions

[0013] The articles “a” and “an” are used herein to refer to one or to more than one (i.e., to at least one) of the grammatical object of the article. By way of example, “an element” means one element or more than one element.

[0014] Throughout this specification, the word “comprise” or variations such as “comprises” or “comprising” will be understood to imply the inclusion of a stated integer or groups of integers but not the exclusion of any other integer or group of integers.

[0015] As used herein, the terms “effective amount” and “therapeutically effective amount” mean a dosage sufficient to produce a desired result, e.g., to prevent or treat a hookworm infection in a subject.

[0016] The term “prevent” is art-recognized, and when used in relation to a condition, such as a hookworm infection, is well understood in the art, and includes administration of a composition which reduces the likelihood of, or delays the onset of, the condition in a subject relative to a subject which does not receive the composition. Thus, prevention of hookworm includes, for example, reducing the likelihood that a subject receiving the composition will develop a hookworm infection relative to a subject that does not receive the composition, and/or reducing the severity of a subsequent hookworm infection, on average, in a treated population versus an untreated control population, e.g., by a statistically and/or clinically significant amount.

[0017] “SEQ ID NOS:1-540” refers to each of the 540 nucleotide sequences included in the associated Sequence Listing file (i.e., each nucleotide sequence from SEQ ID NO:1 to SEQ ID NO:540). Accordingly, “any one of SEQ ID NOS:1-540” refers to any one of the 540 nucleotide sequences in the associated Sequence Listing file (i.e., any one of the 540 nucleotide sequences from SEQ ID NO:1 to SEQ ID NO:540).

[0018] The term “sequence homology” is used interchangeably with “sequence identity” herein. Sequence homology and sequence identity may be calculated using programs such as a Clustal or BLAST. The “tblastn” program, for example, translates an inputted nucleotide sequence in each reading frame to arrive six amino acid sequences, and the program searches nucleotide sequence databases translated in each reading frame to identify nucleotide sequences that encode amino acid sequences with homology to an amino acid sequence encoded by the input nucleotide sequence. Thus, tblastn is particularly useful for identifying a nucleotide sequence encoding an amino acid sequence, which has sequence homology with an amino acid sequence encoded by a different nucleotide sequence. Both Clustal and BLAST may introduce gaps in order to maximize a sequence homology calculation; for calculating sequence homology or sequence identity with the introduction of gaps, default weights may be used for weighting gaps (e.g., gap opening, gap extension, etc.) relative to homology/identity. For each nucleotide sequence, thymine (“T”) is equivalent to uracil (“U”) for calculating sequence homology or sequence identity.

[0019] The terms “transforming” and “transfecting” are used interchangeably herein and refer to the introduction of a nucleic acid into a cell, e.g., to produce a recombinant cell. A nucleotide sequence encoded by the nucleic acid may or may not be inheritable to the progeny of the cell. Transfection, for example, may be stable (i.e. the nucleic acid is integrated into the genome of a cell and thereby inheritable to the progeny of the cell) or transient (i.e., wherein the expression of a nucleotide sequence encoded by the nucleic acid is lost after a period of time).

[0020] As used herein, the terms “treat”, “treating”, and “treatment” include inhibiting the condition, e.g., reducing the onset or symptoms of a condition, disorder, or disease, such as a hookworm infection. These terms also encompass therapy. Treatment means any manner in which the symptoms of a condition, disorder, or disease are ameliorated or otherwise beneficially altered. Preferably, the subject in need of such treatment is a mammal, such as a human, pet (e.g., cat or dog), or farm animal.

### I. NUCLEIC ACIDS

[0021] In some aspects, the invention relates to a nucleic acid comprising a nucleotide sequence encoding an amino acid sequence, e.g., an antigen. An epitope may be, for example, as small as 8 amino acids, and thus, an amino acid sequence as short as 8 amino acids may be sufficient to produce an immune response in a subject. Thus, a nucleic acid may be useful for producing an antigen even if the nucleic acid encodes only a short fragment of a protein, e.g., as few as 5, 6, 7, 8, 9, or 10 amino acids. Additionally, the codons of a nucleotide sequence may be altered, for example, to optimize the expression of an amino acid sequence in a cell or for molecular cloning, such as to introduce or remove restriction sites. Thus, a nucleotide sequence encoding an amino acid sequence for expression in a cell may vary from a nucleotide sequence obtained, for example, by sequencing a genome. Further, an amino acid sequence that varies from a naturally-occurring amino acid sequence (e.g., a hookworm sequence) may nevertheless provoke an immune response against the naturally-occurring sequence. Similarly, an amino acid sequence from one species of hookworm may vary from an orthologous amino acid sequence in a different species of hookworm. Thus, a nucleotide sequence may encode an amino acid sequence that provokes an immune response against a different amino acid sequence (e.g., a hookworm sequence), even though the two sequences vary, so long as the two sequences have sufficient sequence homology (e.g., at least 95% sequence homology).

[0022] In some embodiments, the invention relates to a nucleic acid comprising a nucleotide sequence encoding an amino acid sequence comprising at least 10 consecutive amino acids encoded by an open reading frame in any one of SEQ ID NOS:1-540. The nucleotide sequence may encode an amino acid sequence comprising at least 5, 6, 7, 8, 9, 10, 11, 12, 13, 14, 15, 16, 17, 18, 19, 20, 21, 22, 23, 24, 25, 26, 27, 28, 29, 30, 31, 32, 33, 34, 35, 36, 37, 38, 39, 40, 41, 42, 43, 44, 45, 46, 47, 48, 49, 50, 55, 60, 65, 70, 75, 80, 85, 90, 95, 100, 110, 120, 130, 140, 150, 160, 170, 180, 190, 200, 220, 240, 260, 280, 300, 325, 350, 375, 400, 425, 450, 475, 500, 550, 600, 650, 700, 750, 800, 850, 900, 950, 1000, 1100, 1200, 1300, 1400, 1500, 1600, 1700, 1800, 1900, or 2000 consecutive amino acids encoded by an open reading frame in any one of SEQ ID NOS:1-540. The nucleotide sequence may encode an amino acid sequence with at least about 95% sequence homology with an amino acid sequence comprising at least 5, 6, 7, 8, 9, 10, 11, 12, 13, 14, 15, 16, 17, 18, 19, 20, 21, 22, 23, 24, 25, 26, 27, 28, 29, 30, 31, 32, 33, 34, 35, 36, 37, 38, 39, 40, 41, 42, 43, 44, 45, 46, 47, 48, 49, 50, 55, 60, 65, 70, 75, 80, 85, 90, 95, 100, 110, 120, 130, 140, 150, 160, 170, 180, 190, 200, 220, 240, 260, 280, 300, 325, 350, 375, 400, 425, 450, 475, 500, 550, 600, 650, 700, 750, 800, 850, 900, 950, 1000, 1100, 1200, 1300, 1400, 1500, 1600, 1700, 1800, 1900, or 2000 consecutive amino acids encoded by an open reading frame in any one of SEQ ID NOS:1-540. The nucleotide sequence may encode an amino acid sequence with at least about 85%, 86%, 87%, 88%, 89%, 90%, 91%, 92%, 93%, 94%, 95%, 96%, 97%, 98%, 99%, 99.5%, 99.8%, 99.9%, or even 100% sequence homology with an amino acid sequence comprising at least 5, 6, 7, 8, 9, 10, 11, 12, 13, 14, 15, 16, 17, 18, 19, 20, 21, 22, 23, 24, 25, 26, 27, 28, 29, 30, 31, 32, 33, 34, 35, 36, 37, 38, 39, 40, 41, 42, 43, 44, 45, 46, 47, 48, 49, 50, 55, 60, 65, 70, 75, 80, 85, 90, 95, 100, 110, 120, 130, 140, 150, 160, 170, 180, 190, 200, 220, 240, 260, 280, 300, 325, 350, 375, 400, 425, 450, 475, 500, 550, 600, 650, 700, 750, 800, 850, 900, 950, 1000, 1100, 1200, 1300, 1400, 1500, 1600, 1700, 1800, 1900, or 2000 consecutive amino acids encoded by an open reading frame in any one of SEQ ID NOS:1-540.

[0023] The nucleotide sequence may encode an amino acid sequence encoded by an open reading frame in any one of SEQ ID NOS:1-540. The nucleotide sequence may encode an amino acid sequence with at least about 95% sequence homology with an amino acid sequence encoded by an open reading frame in any one of SEQ ID NOS:1-540. The nucleotide sequence may encode an amino acid sequence with at least about 85%, 86%, 87%, 88%, 89%, 90%, 91%, 92%, 93%, 94%, 95%, 96%, 97%, 98%, 99%, 99.5%, 99.8%, 99.9%, or even 100% sequence homology with an amino acid sequence encoded by an open reading frame in any one of SEQ ID NOS:1-540.

[0024] An open reading frame includes any nucleotide sequence that encodes consecutive amino acids. In preferred embodiments, the open reading frame is Frame 1, read from 5′ to 3′, for SEQ ID NOS:1-532 and SEQ ID NO:537-540, and Frame 3, read from 5′ to 3′, for SEQ ID NO:533-536. In general, however, each sequence of SEQ ID NOS:1-540, comprises an open reading frame that spans the entire length of the nucleotide sequence, terminating in a stop codon (e.g., Frame 1, read from 5′ to 3′), and thus, any nucleotide sequence comprising at least 9 consecutive nucleotides in SEQ ID NOS:1-540 will encode an amino acid sequence (i.e., at least 2 consecutive amino acids) encoded by the preferred open reading frame.

[0025] In some preferred embodiments, the nucleic acid comprises a promoter operably linked to the nucleotide sequence encoding the amino acid sequence, i.e., to drive the transcription of the nucleotide sequence in a cell. The nucleic acid may not comprise a promoter, for example, when the nucleic acid is RNA, when the nucleic acid is used in a method to make a cell or nucleic acid (e.g., according to certain embodiments of the invention), or when the nucleic acid is used in a vaccine. In preferred embodiments, the promoter is linked to the nucleotide sequence such that transcripts of the nucleotide sequence may be translated in a preferred open reading frame (Frame 1, read from 5′ to 3′, for SEQ ID NOS:1-532 and SEQ ID NOS:537-540, and Frame 3, read from 5′ to 3′, for SEQ ID NOS:533-536).

[0026] In preferred embodiments, the promoter is not a hookworm promoter. In some embodiments, the promoter can drive transcription of the nucleotide sequence in a bacterium, yeast, fungal cell, plant cell, insect cell, or mammalian cell. In preferred embodiments, the promoter can drive transcription of the nucleotide sequence in Escherichia coli, Bacillus subtilis, Pseudomonas fluorescens, Leishmania tarentolae, Saccharomyces cerevisiae, Pichia Pastoris, Nicotiana, Drosophila melanogaster, Spodoptera frugiperda, Trichoplusia ni, Gallus gallus, Mus musculus, Sus scrofa, Ovis aries, Capra aegagrus, Bos taurus, Sf9 cells, Sf21 cells, Schneider 2 cells, Schneider 3 cells, High Five cells, NS0 cells, Chinese Hamster Ovary (“CHO”) cells, Baby Hamster Kidney cells, COS cells, Vero cells, HeLa cells, or HEK 293 cells.

[0027] In some preferred embodiments, the promoter can drive transcription of the nucleotide sequence in Escherichia coli, Saccharomyces cerevisiae, or CHO cells.

[0028] In some embodiments, the nucleic acid comprises an origin of replication, e.g., for replication in a cloning cell or an expression cell. In some embodiments, the nucleic acid encodes at least one affinity tag, e.g., for purifying an antigen, such as AviTag, Calmodulin-tag, polyglutamate tag, E-tag, FLAG-tag, HA-tag, His-tag, Myc-tag, S-tag, SBP-tag, Softag 1, Softag 3, Strep-tag, TC tag, V5 tag, VSV-tag, Xpress tag, Isopeptag, and/or SpyTag. In some embodiments, the nucleic acid encodes a chaperone, such as glutathione S-transferase, to increase the expression or the stability of an antigen. In some embodiments, the nucleic acid encodes a protease cleavage site, e.g., for removing an affinity tag or chaperone, such as a protease cleavage site for cleavage by enteropeptidase, Factor Xa, rhinovirus 3C protease, TEV protease, or thrombin. In some embodiments, the nucleic acid encodes a methionine, e.g., for removing an affinity tag or chaperone by hydrolysis with cyanogen bromide.

[0029] In some embodiments, the nucleic acid is a plasmid or linear nucleic acid.

### II. CELLS COMPRISING A NUCLEOTIDE SEQUENCE

[0030] a. Methods for Transforming or Transfecting a Cell

[0031] In some aspects, the invention relates to method for transforming or transfecting a cell, comprising transforming or transfecting a cell with a nucleic acid comprising a nucleotide sequence as described herein, supra. For example, the nucleic acid may comprise a nucleotide sequence that encodes an amino acid sequence with at least about 85%, 86%, 87%, 88%, 89%, 90%, 91%, 92%, 93%, 94%, 95%, 96%, 97%, 98%, 99%, 99.5%, 99.8%, 99.9%, or even 100% sequence homology with an amino acid sequence comprising at least 5, 6, 7, 8, 9, 10, 11, 12, 13, 14, 15, 16, 17, 18, 19, 20, 21, 22, 23, 24, 25, 26, 27, 28, 29, 30, 31, 32, 33, 34, 35, 36, 37, 38, 39, 40, 41, 42, 43, 44, 45, 46, 47, 48, 49, 50, 55, 60, 65, 70, 75, 80, 85, 90, 95, 100, 110, 120, 130, 140, 150, 160, 170, 180, 190, 200, 220, 240, 260, 280, 300, 325, 350, 375, 400, 425, 450, 475, 500, 550, 600, 650, 700, 750, 800, 850, 900, 950, 1000, 1100, 1200, 1300, 1400, 1500, 1600, 1700, 1800, 1900, or 2000 consecutive amino acids encoded by an open reading frame in any one of SEQ ID NOS:1-540. The nucleic acid may or may not comprise a promoter. In some embodiments, the nucleic acid consists of a nucleic acid as described herein, supra.

[0032] b. Cells that may be Transformed or Transfected

[0033] In some embodiments, the cell is a bacterium, yeast, fungal cell, plant cell, insect cell, or mammalian cell. The cell may be, for example, a cloning cell or an expression cell. Suitable expression cells include Escherichia coli, Bacillus subtilis, Pseudomonas fluorescens, Leishmania tarentolae, Saccharomyces cerevisiae, Pichia Pastoris, Nicotiana, Drosophila melanogaster, Spodoptera frugiperda, Trichoplusia ni, Gallus gallus, Mus musculus, Sus scrofa, Ovis aries, Capra aegagrus, Bos taurus, Sf9 cells, Sf21 cells, Schneider 2 cells, Schneider 3 cells, High Five cells, NS0 cells, Chinese Hamster Ovary (“CHO”) cells, Baby Hamster Kidney cells, COS cells, Vero cells, HeLa cells, and HEK 293 cells. In some preferred embodiments, the cell is an Escherichia coli, Saccharomyces cerevisiae, or CHO cell.

[0034] c. Transformed/Transfected Cells

[0035] In some aspects, the invention relates to any one of the aforementioned cells comprising a nucleotide sequence as described herein, supra. For example, the nucleotide sequence may encode an amino acid sequence with at least about 85%, 86%, 87%, 88%, 89%, 90%, 91%, 92%, 93%, 94%, 95%, 96%, 97%, 98%, 99%, 99.5%, 99.8%, 99.9%, or even 100% sequence homology with an amino acid sequence comprising at least 5, 6, 7, 8, 9, 10, 11, 12, 13, 14, 15, 16, 17, 18, 19, 20, 21, 22, 23, 24, 25, 26, 27, 28, 29, 30, 31, 32, 33, 34, 35, 36, 37, 38, 39, 40, 41, 42, 43, 44, 45, 46, 47, 48, 49, 50, 55, 60, 65, 70, 75, 80, 85, 90, 95, 100, 110, 120, 130, 140, 150, 160, 170, 180, 190, 200, 220, 240, 260, 280, 300, 325, 350, 375, 400, 425, 450, 475, 500, 550, 600, 650, 700, 750, 800, 850, 900, 950, 1000, 1100, 1200, 1300, 1400, 1500, 1600, 1700, 1800, 1900, or 2000 consecutive amino acids encoded by an open reading frame in any one of SEQ ID NOS:1-540. In some preferred embodiments, i.e., when the cell is an expression cell, the nucleotide sequence is operably linked to a promoter. The nucleotide sequence may not be operably linked to a promoter, for example, when the cell is a cloning cell.

### III. METHODS FOR PRODUCING AN ANTIGEN

[0036] a. Peptides and proteins comprising an antigen

[0037] In some aspects, the invention relates to a peptide or protein comprising an antigen. The peptide or protein may consist essentially of the antigen, or the peptide or protein may be, for example, a fusion protein that comprises the antigen. The antigen may comprise an amino acid sequence comprising at least 10 consecutive amino acids encoded by an open reading frame in any one of SEQ ID NOS:1-540. The antigen may comprise at least 5, 6, 7, 8, 9, 10, 11, 12, 13, 14, 15, 16, 17, 18, 19, 20, 21, 22, 23, 24, 25, 26, 27, 28, 29, 30, 31, 32, 33, 34, 35, 36, 37, 38, 39, 40, 41, 42, 43, 44, 45, 46, 47, 48, 49, 50, 55, 60, 65, 70, 75, 80, 85, 90, 95, 100, 110, 120, 130, 140, 150, 160, 170, 180, 190, 200, 220, 240, 260, 280, 300, 325, 350, 375, 400, 425, 450, 475, 500, 550, 600, 650, 700, 750, 800, 850, 900, 950, 1000, 1100, 1200, 1300, 1400, 1500, 1600, 1700, 1800, 1900, or 2000 consecutive amino acids encoded by an open reading frame in any one of SEQ ID NOS:1-540. The antigen may comprise an amino acid sequence with at least about 95% sequence homology with an amino acid sequence comprising at least 5, 6, 7, 8, 9, 10, 11, 12, 13, 14, 15, 16, 17, 18, 19, 20, 21, 22, 23, 24, 25, 26, 27, 28, 29, 30, 31, 32, 33, 34, 35, 36, 37, 38, 39, 40, 41, 42, 43, 44, 45, 46, 47, 48, 49, 50, 55, 60, 65, 70, 75, 80, 85, 90, 95, 100, 110, 120, 130, 140, 150, 160, 170, 180, 190, 200, 220, 240, 260, 280, 300, 325, 350, 375, 400, 425, 450, 475, 500, 550, 600, 650, 700, 750, 800, 850, 900, 950, 1000, 1100, 1200, 1300, 1400, 1500, 1600, 1700, 1800, 1900, or 2000 consecutive amino acids encoded by an open reading frame in any one of SEQ ID NOS:1-540. The antigen may comprise an amino acid sequence with at least about 85%, 86%, 87%, 88%, 89%, 90%, 91%, 92%, 93%, 94%, 95%, 96%, 97%, 98%, 99%, 99.5%, 99.8%, 99.9%, or even 100% sequence homology with an amino acid sequence comprising at least 5, 6, 7, 8, 9, 10, 11, 12, 13, 14, 15, 16, 17, 18, 19, 20, 21, 22, 23, 24, 25, 26, 27, 28, 29, 30, 31, 32, 33, 34, 35, 36, 37, 38, 39, 40, 41, 42, 43, 44, 45, 46, 47, 48, 49, 50, 55, 60, 65, 70, 75, 80, 85, 90, 95, 100, 110, 120, 130, 140, 150, 160, 170, 180, 190, 200, 220, 240, 260, 280, 300, 325, 350, 375, 400, 425, 450, 475, 500, 550, 600, 650, 700, 750, 800, 850, 900, 950, 1000, 1100, 1200, 1300, 1400, 1500, 1600, 1700, 1800, 1900, or 2000 consecutive amino acids encoded by an open reading frame in any one of SEQ ID NOS:1-540.

[0038] The antigen may comprise an amino acid sequence encoded by an open reading frame in any one of SEQ ID NOS:1-540. The antigen may comprise an amino acid sequence with at least about 95% sequence homology with an amino acid sequence encoded by an open reading frame in any one of SEQ ID NOS:1-540. The antigen may comprise an amino acid sequence with at least about 85%, 86%, 87%, 88%, 89%, 90%, 91%, 92%, 93%, 94%, 95%, 96%, 97%, 98%, 99%, 99.5%, 99.8%, 99.9%, or even 100% sequence homology with an amino acid sequence encoded by an open reading frame in any one of SEQ ID NOS:1-540.

[0039] The peptide or protein may comprise at least one affinity tag, e.g., for purification, such as AviTag, Calmodulin-tag, polyglutamate tag, E-tag, FLAG-tag, HA-tag, His-tag, Myc-tag, S-tag, SBP-tag, Softag 1, Softag 3, Strep-tag, TC tag, V5 tag, VSV-tag, Xpress tag, Isopeptag, and/or SpyTag. The peptide or protein may comprise a chaperone, such as glutathione 5-transferase, e.g., to increase the expression or stability of an antigen. In some embodiments, the peptide or protein comprises a protease cleavage site, e.g., for removing an affinity tag or chaperone, such as a protease cleavage site for cleavage by enteropeptidase, Factor Xa, rhinovirus 3C protease, TEV protease, or thrombin. In some embodiments, the peptide or protein comprises a methionine, e.g., for removing an affinity tag or chaperone by hydrolysis with cyanogen bromide.

[0040] b. Methods for producing an antigen

[0041] In some aspects, the invention relates to a method for producing a peptide or protein, comprising incubating a cell as described herein, i.e., an expression cell comprising a nucleotide sequence as described herein, under conditions sufficient to express the nucleotide sequence, thereby producing the peptide or protein. The method may further comprise purifying and/or isolating the peptide or protein, e.g., by centrifugation, filtration, an affinity tag, and/or chromatography, such as ion exchange chromatography, size exclusion chromatography, affinity chromatography, etc.

[0042] In some aspects, the invention relates to a method for producing an antigen, comprising incubating a cell as described herein, i.e., an expression cell comprising a nucleotide sequence as described herein, under conditions sufficient to express the nucleotide sequence, thereby producing the antigen. The method may further comprise purifying and/or isolating the antigen, e.g., by centrifugation, filtration, an affinity tag, and/or chromatography, such as ion exchange chromatography, size exclusion chromatography, affinity chromatography, etc.

### IV. PEPTIDES, PROTEINS, AND ANTIGENS

[0043] In some aspects, the invention relates to a peptide or protein, wherein the peptide or protein comprises at least 10 consecutive amino acids encoded by an open reading frame in any one of SEQ ID NOS:1-540. The peptide or protein may comprise an amino acid sequence comprising at least 5, 6, 7, 8, 9, 10, 11, 12, 13, 14, 15, 16, 17, 18, 19, 20, 21, 22, 23, 24, 25, 26, 27, 28, 29, 30, 31, 32, 33, 34, 35, 36, 37, 38, 39, 40, 41, 42, 43, 44, 45, 46, 47, 48, 49, 50, 55, 60, 65, 70, 75, 80, 85, 90, 95, 100, 110, 120, 130, 140, 150, 160, 170, 180, 190, 200, 220, 240, 260, 280, 300, 325, 350, 375, 400, 425, 450, 475, 500, 550, 600, 650, 700, 750, 800, 850, 900, 950, 1000, 1100, 1200, 1300, 1400, 1500, 1600, 1700, 1800, 1900, or 2000 consecutive amino acids encoded by an open reading frame in any one of SEQ ID NOS:1-540. The peptide or protein may comprise an amino acid sequence with at least about 95% sequence homology with an amino acid sequence comprising at least 5, 6, 7, 8, 9, 10, 11, 12, 13, 14, 15, 16, 17, 18, 19, 20, 21, 22, 23, 24, 25, 26, 27, 28, 29, 30, 31, 32, 33, 34, 35, 36, 37, 38, 39, 40, 41, 42, 43, 44, 45, 46, 47, 48, 49, 50, 55, 60, 65, 70, 75, 80, 85, 90, 95, 100, 110, 120, 130, 140, 150, 160, 170, 180, 190, 200, 220, 240, 260, 280, 300, 325, 350, 375, 400, 425, 450, 475, 500, 550, 600, 650, 700, 750, 800, 850, 900, 950, 1000, 1100, 1200, 1300, 1400, 1500, 1600, 1700, 1800, 1900, or 2000 consecutive amino acids encoded by an open reading frame in any one of SEQ ID NOS:1-540. The peptide or protein may comprise an amino acid sequence with at least about 85%, 86%, 87%, 88%, 89%, 90%, 91%, 92%, 93%, 94%, 95%, 96%, 97%, 98%, 99%, 99.5%, 99.8%, 99.9%, or even 100% sequence homology with an amino acid sequence comprising at least 5, 6, 7, 8, 9, 10, 11, 12, 13, 14, 15, 16, 17, 18, 19, 20, 21, 22, 23, 24, 25, 26, 27, 28, 29, 30, 31, 32, 33, 34, 35, 36, 37, 38, 39, 40, 41, 42, 43, 44, 45, 46, 47, 48, 49, 50, 55, 60, 65, 70, 75, 80, 85, 90, 95, 100, 110, 120, 130, 140, 150, 160, 170, 180, 190, 200, 220, 240, 260, 280, 300, 325, 350, 375, 400, 425, 450, 475, 500, 550, 600, 650, 700, 750, 800, 850, 900, 950, 1000, 1100, 1200, 1300, 1400, 1500, 1600, 1700, 1800, 1900, or 2000 consecutive amino acids encoded by an open reading frame in any one of SEQ ID NOS:1-540.

[0044] The peptide or protein may comprise an amino acid sequence encoded by an open reading frame in any one of SEQ ID NOS:1-540. The peptide or protein may comprise an amino acid sequence with at least about 95% sequence homology with an amino acid sequence encoded by an open reading frame in any one of SEQ ID NOS:1-540. The peptide or protein may comprise an amino acid sequence with at least about 85%, 86%, 87%, 88%, 89%, 90%, 91%, 92%, 93%, 94%, 95%, 96%, 97%, 98%, 99%, 99.5%, 99.8%, 99.9%, or even 100% sequence homology with an amino acid sequence encoded by an open reading frame in any one of SEQ ID NOS:1-540.

[0045] The peptide or protein may be an antigen, or the peptide or protein may comprise an antigen. In some embodiments, the peptide or protein is not an antigen (and does not comprise an antigen), e.g., wherein the peptide or protein is administered to modulate the immune system of a subject.

### V. PHARMACEUTICAL FORMULATIONS COMPRISING A PEPTIDE, PROTEIN, ANTIGEN, OR NUCLEIC ACID

[0046] In some aspects, the invention relates to a composition comprising a peptide, protein, antigen, or nucleic acid as described herein. The composition may be formulated for injection, e.g., the composition may be a liquid. The composition may be formulated for injection into a subject, such as a human subject. The composition may be sterile. The composition may be a pharmaceutical composition, such as a sterile, injectable pharmaceutical composition. The composition may be formulated for intramuscular or subcutaneous injection. In some embodiments, the composition is formulated for transdermal, intradermal, transmucosal, nasal, inhalational, or enteral administration.

[0047] The composition may comprise a peptide, protein, antigen, or nucleic acid, as described herein, in a pharmaceutically acceptable carrier. As used herein “pharmaceutically acceptable carrier” includes any and all solvents, dispersion media, coatings, antibacterial and antifungal agents, isotonic and absorption delaying agents, and the like. The use of such media and agents for pharmaceutically active substances is well known in the art. Except insofar as any conventional media or agent is incompatible with the active compound, use thereof in the therapeutic compositions is contemplated. Supplementary active compounds can also be incorporated into the compositions.

[0048] Pharmaceutically acceptable diluents include saline and aqueous buffer solutions. Pharmaceutical compositions suitable for injection include sterile aqueous solutions (where water soluble) or dispersions and sterile powders for the extemporaneous preparation of sterile injectable solutions or dispersions. Isotonic agents, for example, sugars, polyalcohols such as mannitol and sorbitol, and/or sodium chloride may be included in the pharmaceutical composition. In all cases, the composition should be sterile and should be fluid. It should be stable under the conditions of manufacture and storage and must include preservatives that prevent contamination with microorganisms, such as bacteria and fungi. Dispersions can also be prepared in glycerol, liquid polyethylene glycols, and mixtures thereof and in oils. Under ordinary conditions of storage and use, these preparations may contain a preservative to prevent the growth of microorganisms.

[0049] The carrier can be a solvent or dispersion medium containing, for example, water, ethanol, polyol (for example, glycerol, propylene glycol, and liquid polyethylene glycol, and the like), and suitable mixtures thereof. The proper fluidity can be maintained, for example, by the use of a coating such as lecithin, by the maintenance of the required particle size in the case of dispersion and by the use of surfactants.

[0050] Prevention of the action of microorganisms in the pharmaceutical composition can be achieved by various antibacterial and antifungal agents, for example, parabens, chlorobutanol, phenol, ascorbic acid, thimerosal, and the like.

[0051] Compositions may be formulated in dosage unit form for ease of administration and uniformity of dosage. Dosage unit form refers to physically discrete units suited as unitary dosages for a mammalian subject; each unit contains a predetermined quantity of active material (e.g., the peptide, protein, antigen, or nucleic acid) calculated to produce the desired therapeutic effect, in association with the required pharmaceutical carrier. The specification for the dosage unit forms of the invention are dictated by and directly dependent on (a) the unique characteristics of the active material and the particular therapeutic effect to be achieved, and (b) the limitations inherent in the art of compounding such an active compound for the treatment of, and sensitivity of, individual subjects.

[0052] For lung instillation, aerosolized solutions are used. In sprayable aerosol preparations, the active protein may be in combination with a solid or liquid inert carrier material. The compositions may also be packaged in a squeeze bottle or in admixture with a pressurized volatile, normally gaseous propellant. The aerosol preparations can contain solvents, buffers, surfactants, and antioxidants in addition to the protein of the invention.

[0053] Other pharmaceutically acceptable carriers for the compositions according to the present invention are liposomes, pharmaceutical compositions in which the active peptide, protein, antigen, or nucleic acid is contained either dispersed or variously present in corpuscles consisting of aqueous concentric layers adherent to lipidic layers. The peptide, protein, antigen, or nucleic acid is preferably present in the aqueous layer and in the lipidic layer, inside or outside, or, in any event, in the non-homogeneous system generally known as a liposomic suspension. The hydrophobic layer, or lipidic layer, generally, but not exclusively, comprises phospholipids such as lecithin and sphingomyelin, steroids such as cholesterol, more or less ionic surface active substances such as dicetylphosphate, stearylamine or phosphatidic acid, and/or other materials of a hydrophobic nature. Those skilled in the art will appreciate other suitable embodiments of the present liposomal formulations.

### VI. METHODS FOR PREVENTING OR TREATING A HOOKWORM INFECTION

[0054] a. Methods comprising administering a peptide, protein, antigen, or nucleic acid

[0055] In some aspects, the invention relates to a method for preventing or treating a hookworm infection in a subject, comprising administering to the subject a composition comprising a peptide or protein as described herein. In some embodiments, the invention relates to a method for preventing or treating a hookworm infection in a subject, comprising administering to the subject a composition comprising an antigen as described herein. In some embodiments, the invention relates to a method for preventing or treating a hookworm infection in a subject, comprising administering to the subject a composition comprising a nucleic acid as described herein.

[0056] The hookworm infection may be caused, for example, by Ancylostoma duodenale, Necator americanus, or Ancylostoma ceylanicum. The hookworm infection may be caused by Ancylostoma braziliense or Ancylostoma tubaeforme. In some embodiments, the hookworm infection is caused by Ancylostoma caninum.

[0057] Administering the composition may comprise any suitable means of delivering a peptide, protein, antigen, or nucleic acid to elicit an immune response. Administering a composition preferably comprises parenteral administration. In preferred embodiments, the composition is administered by subcutaneous or intramuscular injection. Administering a peptide, protein, antigen, or nucleic acid may comprise transdermal, intradermal, transmucosal, nasal, inhalational, or enteral administration.

[0058] b. Subjects

[0059] The subject may be any organism susceptible to a hookworm infection or any organism that may carry and/or transmit a hookworm. In some embodiments, the subject is selected from murines, felines, canines, ovines, porcines, bovines, equines, and primates. For example, the subject may be selected from Felis catus, Canis lupus familiaris, and Homo sapiens. In some embodiments, the subject is a golden hamster (Mesocricetus auratus). The subject may or may not have a hookworm infection. For example, the subject may have been exposed to a hookworm, the subject may be at risk of hookworm infection, or the subject may be visiting a location associated with an elevated risk of hookworm infection. In some embodiments, the subject does not have a hookworm infection and the subject does not have an elevated risk of hookworm infection.

### VII. METHODS FOR MODULATING AN IMMUNE RESPONSE IN A SUBJECT

[0060] a. Methods comprising administering a peptide, protein, antigen, or nucleic acid

[0061] In some aspects, the invention relates to a method for modulating an immune response in a subject, comprising administering to the subject a composition comprising a peptide or protein as described herein. In some embodiments, the invention relates to a method for modulating an immune response in a subject, comprising administering to the subject a composition comprising an antigen as described herein. In some embodiments, the invention relates to a method for modulating an immune response in a subject, comprising administering to the subject a composition comprising a nucleic acid as described herein.

[0062] In some embodiments, modulating an immune response in a subject relates to increasing an immune response, e.g., against the peptide, protein, antigen, or nucleic acid. For example, administering the composition to a subject may cause the subject to mount an immune response against the peptide, protein, antigen, or nucleic acid.

[0063] In other embodiments, modulating an immune response in a subject relates to decreasing an immune response, e.g., an autoimmune response or an immune response associated with a medical treatment, such as a transplant or biologic therapy. For example, certain aspects of the invention relate to the ability of hookworms to dampen the immune systems of their hosts. Hookworm nucleotide sequences encoding proteins that are likely to be immunosuppressive include ASPR genes (SEQ ID NOS:1-187), mammalian-like lectin genes (SEQ ID NOS:188-203), and protease and protease inhibitor genes (SEQ ID NOS:405-540).

[0064] Administering the composition may comprise any suitable means for delivering a peptide, protein, antigen, or nucleic acid to a subject. Administering a composition preferably comprises parenteral administration. In some embodiments, the composition is administered by subcutaneous, intramuscular, or intravenous injection. Administering a peptide, protein, antigen, or nucleic acid may comprise transdermal, intradermal, transmucosal, nasal, inhalational, or enteral administration.

[0065] b. Subjects

[0066] In some embodiments, the subject is selected from murines, felines, canines, ovines, porcines, bovines, equines, and primates. For example, the subject may be selected from Homo sapiens and Mus musculus. The subject may have an autoimmune disease or condition. In some embodiments, the subject is in need of immunosuppression.

### EXEMPLIFICATION

[0067] The present description is further illustrated by the following examples, which should not be construed as limiting in any way. The contents of all cited references (including literature references, issued patents, and published patent applications) are hereby expressly incorporated by reference. When definitions of terms in documents that are incorporated by reference herein conflict with those used herein, the definitions used herein govern.

### Example 1

### Identification of the ASPR Protein Family

[0068] Example 1 describes a new family of protein-coding genes in Ancylostoma ceylanicum, called ASPRs. They have the following traits, which indicate that their products might be useful vaccines: they are distantly related to Ancylostoma Secreted Proteins (“ASPs”), which are suspected to enable parasitic infection in some manner which may include immunosuppression; like ASPs, they are strongly upregulated at the onset of A. ceylanicum infection in vivo; like ASPs, their gene products are predicted to be secreted; and an ASPR of the parasitic nematode Heligmosomoides polygyrus bakeri has been biochemically shown to be secreted into the host during infection. The predicted coding DNA sequences for A. ceylanicum ASPR genes are disclosed in SEQ ID NO:1 to SEQ ID NO:187, which encode amino acid sequences that may serve as useful antigens for preventing or treating a hookworm infection.

[0069] The genome and infectious transcriptome of Ancylostoma ceylanicum, a hookworm which infects both humans and other mammals, and predicted its genome to contain 37,016 protein-coding genes was sequenced. To find which genes were specifically activated during infection, the expression profile was assessed by RNA-seq analysis at the following infection stages (with A. ceylanicum in golden hamsters): infectious third-stage larvae, before infection (L3i); 24 hours after infection in vivo (in the stomach lining of the hamster; 24PI); 24 hours after incubation in hookworm culture medium, a commonly used synthetic model of infection (24HCM); 5 days after infection (5.D); 12 days after infection (12.D); 17 and 19 days after infection (17.D and 19.D). Genes were classified both by known protein motifs (through HMMER 3.0/Pfam-A 26 and InterProScan 4.8) and by uncharacterized protein motifs and homologies (through HMMER 3.0/Pfam-B 26 and OrthoMCL 1.3). For OrthoMCL, the predicted A. ceylanicum protein-coding genes were compared to those of ten other nematodes from WormBase release WS230 (Ascaris suum, Brugia malayi, Bursaphelenchus xylophilus, Caenorhabditis elegans, C. briggsae, Dirofilaria immitis, Haemonchus contortus, Meloidogyne hapla, Pristionchus pacificus, and Trichinella spiralis) and to those of two mammals from Ensembl release 70 (Homo sapiens and Mus musculus). Sources of these proteomes are listed in Table 1.

TABLE 1
Sources of the nematode and mammalian proteomes that were compared in order to define
new orthology groups in A. ceylanicum, or to define the ASPR protein family.

Ancylostoma ceylanicum (zoonotic hookworm parasite): Proprietary; see Sequence Listing
Ancylostoma caninum, translated ESTs (hookworm parasite of dogs): http://nematode.net/Data/
translations_ftp/AC.trans.final.faa.
Ascaris suum (roundworm parasite of pigs, closely related to the human roundworm parasite
Ascaris lumbricoides): ftp://ftp.sanger.ac.uk/pub2/wormbase/releases/WS230/species/a_suum/
a_suum.WS230.protein.fa.gz.
Brugia malayi (parasitic nematode of humans): ftp://ftp.sanger.ac.uk/pub2/wormbase/releases/
WS230/species/b_malayi/b_malayi.WS230.protein.fa.gz.
Bursaphelenchus xylophilus (parasitic nematode of trees): ftp://ftp.sanger.ac.uk/pub2/wormbase/
releases/WS230/species/b_xylophilus/b_xylophilus.WS230.protein.fa.gz.
Caenorhabditis angaria (non-parasitic nematode, closely related to C. elegans): ftp://
ftp.sanger.ac.uk/pub2/wormbase/releases/WS230/species/c_angaria/c_angaria.WS230.protein.fa.gz.
Caenorhabditis brenneri (non-parasitic nematode, closely related to C. elegans): ftp://
ftp.sanger.ac.uk/pub2/wormbase/releases/WS230/species/c_brenneri/c_brenneri.WS230.protein.
fa.gz.
Caenorhabditis briggsae (non-parasitic nematode, closely related to C. elegans): ftp://ftp.sanger.
ac.uk/pub2/wormbase/releases/WS230/species/c_briggsae/c_briggsae.WS230.protein.fa.gz.
Caenorhabditis elegans (experimentally well-characterized non-parasitic nematode): ftp://ftp.
sanger.ac.uk/pub2/wormbase/releases/WS230/species/c_elegans/c_elegans.WS230.protein.fa.gz.
Caenorhabditis remanei (non-parasitic nematode, closely related to C. elegans): ftp://
ftp.sanger.ac.uk/pub2/wormbase/releases/WS230/species/c_remanei/c_remanei.WS230.protein.
fa.gz.
Caenorhabditis japonica (non-parasitic nematode, closely related to C. elegans): ftp://
ftp.sanger.ac.uk/pub2/wormbase/releases/WS230/species/c_japonica/c_japonica.WS230.protein.
fa.gz.
Caenorhabditis sp. 5 (non-parasitic nematode, closely related to C. elegans): ftp://
ftp.sanger.ac.uk/pub2/wormbase/releases/WS230/species/c_sp5/c_sp5.WS230.protein.fa.gz.
Caenorhabditis sp. 11 (non-parasitic nematode, closely related to C. elegans): ftp://
ftp.sanger.ac.uk/pub2/wormbase/releases/WS230/species/c_sp11/c_sp11.WS230.protein.fa.gz.
Cooperia oncophora, translated ESTs (parasitic nematode of sheep and goats): http://
nematode.net/Data/transcript_assembly_ftp/Cooperia_Oncophora.p4ePro.fsa.
Dictyocaulus viviparus, translated ESTs (parasitic nematode of cows): http://nematode.net/Data/
transcript_assembly_ftp/D.viviparus_pro.faa.
Dirofilaria immitis (parasitic nematode of dogs): http://nematodes.org/downloads/
959nematodegenomes/blast/db2/nDi.2.2.2.aug.proteins.fasta.gz, dated 07-Aug-2012 12:26.
Haemonchus contortus (parasitic nematode of sheep, closely related to A. ceylanicum). for
OrthoMCL, two sets of gene predictions were used (from MAKER2 and AUGUSTUS), treated
as two species for the purposes of analysis, from Schwarz et al. Genome Biol., 14(8): R89 (2013).
For psi-BLAST, only the MAKER2 set of predictions was used, but a set of gene predictions
from WormBase WS230 was also used: ftp://ftp.sanger.ac.uk/pub2/wormbase/releases/WS230/
species/h_contortus/h_contortus.WS230.protein.fa.gz.
Homo sapiens: ftp://ftp.ensembl.org/pub/release-70/fasta/homo_sapiens/pep/Homo_sapiens.
GRCh37.70.pep.all.fa.gz, dated 12/19/12.
Meloidogyne hapla (parasitic nematode of plants): ftp://ftp.sanger.ac.uk/pub2/wormbase/
releases/WS230/species/m_hapla/m_hapla.WS230.protein.fa.gz.
Loa loa (parasitic nematode of humans): loa_loa_v3_3_proteins.fasta, manually downloaded
from http://www.broadinstitute.org/annotation/genome/filarial_worms/MultiDownloads.html.
Meloidogyne incognita (parasitic nematode of plants): http://www.inra.fr/meloidogyne_{—}
incognita/content/download/3010/29690/version/2/file/MincV1A1.fas.
Mus musculus: ftp://ftp.ensembl.org/pub/release-70/fasta/mus_musculus/pep/Mus_musculus.
GRCm38.70.pep.all.fa.gz, dated 12/19/12.
NEMBASE4, translated EST set from diverse nematode species, including the human hookworm
parasite Necator americanus: http://www.nematodes.org/downloads/databases/NEMBASE4/
NEMBASE4_pro.fsa.tgz.
Oesophasostomum dentatum, translated ESTs (parasitic nematode of pigs): http://nematode.net/
Data/transcript_assembly_ftp/O.dentatum_p4ePro.fsa.
Ostertagia ostertagi, translated ESTs (parasitic nematode of cattle): http://nematode.net/Data/
transcript_assembly_ftp/Ostertagia_ostertagi.p4ePro.fsa; and http://nematode.net/Data/
translations_ftp/OS.trans.final.faa.
Parastrongyloides trichosuri, translated ESTs (parasitic nematode of opossums): http://
nematode.net/Data/translations_ftp/PT.trans.final.faa.
Teladorsagia circumcincta, translated ESTs (parasitic nematode of sheep): http://nematode.net/
Data/transcript_assembly_ftp/T.circumcincta_pro.faa.
Toxocara canis, translated ESTs (parasitic nematode): http://nematode.net/Data/translations_ftp/
TX.trans.final.faa.
Trichostrongylus colubriformis, translated ESTs (parasitic nematode): http://nematode.net/Data/
transcript_assembly_ftp/T.colubriformis_p4ePro.fsa.
Pristionchus pacificus (free-living nematode, closely related to both A. ceylanicum and C.
elegans): ftp://ftp.sanger.ac.uk/pub2/wormbase/releases/WS230/species/p_pacificus/p_pacificus.
WS230.protein.fa.gz.
Strongyloides ratti (parasitic nematode of rats): ftp://ftp.sanger.ac.uk/pub2/wormbase/releases/
WS230/species/s_ratti/s_ratti.WS230.protein.fa.gz.
Trichinella spiralis (parasitic nematode of mammals): ftp://ftp.sanger.ac.uk/pub2/wormbase/
releases/WS230/species/t_spiralis/t_spiralis.WS230.protein.fa.gz.
Wuchereria bancrofti (parasitic nematode of humans): wuchereria_bancrofti_1_proteins.fasta,
manually downloaded from http://www.broadinstitute.org/annotation/genome/filarial_worms/
MultiDownloads.html.

[0070] To link protein traits (motifs or orthology groups) to biological steps of hookworm infection, the rank-sum statistics for expression levels of genes encoding each trait were calculated. If a set of genes sharing a common protein trait was highly skewed towards genes with upregulation or downregulation between steps of infection, this was detectable by a low rank-sum p-value (≦10⁻⁶) for that set. Genes were ranked by their ratios of expression (later stage/earlier stage), with expression measured in transcripts per million (TPM) by RSEM 1.2.0 (Li and Dewey, 2011); distributions of each protein trait were assessed separately with the Perl module Statistics-Test-WilcoxonRankSum-0.0.7 (from cpan.org).

[0071] Among groups of genes significantly upregulated during the first step of infection (from L3i to 24PI), several were already known to be upregulated during parasitic nematode infection (e.g., transthyretin homologs, peptidases, and ASPs). However, a set of 21 A. ceylanicum genes were defined only by an OrthoMCL homology group, which was strongly upregulated during early infection in vivo (from L3i to 24PI, p-value 1.7·10⁻⁶). These proteins encoded none of the motifs from Pfam-A or InterPro associated with ASPs (Allergen V5/Tpx-1-related [IPR001283], Allergen V5/Tpx-1-related, conserved site [IPR018244], CAP domain [IPR014044], or CAP [PF00188.21]), yet they shared at least one block of amino acid similarity. Moreover, they were only weakly upregulated when early infection was simulated by 24 hours of hookworm culture medium (from L3i to 24HCM, p-value 0.03); and thus, they would have gone undetected without in vivo analysis. This gene group defines a new gene family, whose collective upregulation was a previously unknown element of early hookworm infection in vivo.

[0072] To better define more A. ceylanicum proteins of this new type, a compilation of nematode protein sequences was searched to convergence with psi-BLAST 2.2.26+, and a query sequence chosen from the 21-gene OrthoMCL group ORTHOMCL896.14spp. The nematode protein compilation included all the proteomes listed above for OrthoMCL analysis, as well as ten other nematode proteomes from WormBase WS230 or other databases (Caenorhabditis angaria, C. brenneri, C. japonica, C. remanei, C. sp. 5, C. sp. 11, Loa loa, Meloidogyne incognita, Strongyloides ratti, and Wuchereria bancrofti; Table 1), and partial peptides from translated ESTs of various nematode species in Nematode.net and NemBase4 (Table 1).

[0073] Varying the stringency of the psi-BLAST search resulted in varying numbers of genes. At very high stringency (E≦10⁻¹⁵), psi-BLAST converged on 57 genes from A. ceylanicum, none of which encode ASP-associated protein motifs. At more moderate stringency (E≦10⁻⁹), the search converged on 92 A. ceylanicum genes, one of which also encoded a protein motif associated with ASPs. At this stringency, 20 out of 21 members of ORTHOMCL896.14spp were rediscovered. At still more relaxed stringency (E≦10⁻⁶), psi-BLAST converged on 120 A. ceylanicum genes, of which 117 also encoded ASP-associated protein motifs.

[0074] Given these results, all members of ORTHOMCL896.14spp, along with other all genes found through psi-BLAST at 10⁻⁹ that lack known ASP motifs to define an ASP-related family, were categorized as ASPRs. By these criteria, A. ceylanicum has 92 ASPR genes. By the same criteria, partial sequences of non-Ancylostoma ASPRs were identified in Necator americanus and Oesophagostomum dentatum. Using a profile generated in the E≦10⁻⁹ psi-BLAST search, the NCBI non-redundant protein database (NCBI-nr) was further searched, which elicited one ASPR, “novel secreted protein 16”, secreted by adult parasitic Heligmosomoides polygyrus bakeri nematodes into their mammalian hosts. ASPRs from both A. ceylanicum and other non-Ancylostoma species are listed in Tables 2 and 3. For the set of 91 ASPRs identified through psi-BLAST at 10⁻⁹ (as opposed to the initial set of 21 ASPRs in OrthoMCL), upregulation in early infection (L3i to 24.PI) was even more significant (p=4.6·10⁻⁹), while upregulation during simulated infection in vitro was negligible (p=0.44).

TABLE 2
A. ceylanicum ASPR Genes.

| Gene | OrthoMCL | Aligned | Secreted | Max a.a. | 24.PI/L3i | 24HCM/L3i |
|---|---|---|---|---|---|---|
| Acey_2012.08.05_0002.g551 | | + | + | 138 | 0.8873 | 1.0986 |
| Acey_2012.08.05_0004.g1889 | | + | + | 153 | 10.7576 | 6.3939 |
| Acey_2012.08.05_0005.g2681 | | + | | 179 | 0.7692 | 1.0769 |
| Acey_2012.08.05_0010.g1149 | | + | + | 144 | 0.4080 | 0.5360 |
| Acey_2012.08.05_0012.g1803 | | | + | 136 | 6.5657 | 1.3283 |
| Acey_2012.08.05_0013.g2037 | | | + | 130 | 0.6119 | 1.5672 |
| Acey_2012.08.05_0013.g2039 | | + | + | 144 | 0.0440 | 0.2622 |
| Acey_2012.08.05_0015.g2843 | | | | 205 | 0.7273 | 2.1818 |
| Acey_2012.08.05_0015.g2844 | | | + | 149 | 4023.7647 | 7.2353 |
| Acey_2012.08.05_0015.g2860 | | + | + | 151 | 0.8125 | 1.0625 |
| Acey_2012.08.05_0015.g2865 | + | | + | 198 | 8.8333 | 13.3333 |
| Acey_2012.08.05_0015.g2877 | + | + | + | 144 | 10.4412 | 6.4706 |
| Acey_2012.08.05_0015.g2878 | + | | | 223 | 0.8333 | 1.0833 |
| Acey_2012.08.05_0015.g2879 | + | | + | 155 | 6167.8421 | 118.1579 |
| Acey_2012.08.05_0015.g2880 | + | | + | 126 | 5114.0000 | 1270.1719 |
| Acey_2012.08.05_0015.g2881 | + | + | + | 147 | 0.2398 | 0.3216 |
| Acey_2012.08.05_0018.g3499 | + | | | 177 | 1.5385 | 1.0769 |
| Acey_2012.08.05_0018.g3621 | | | | 229 | 1.2955 | 1.0455 |
| Acey_2012.08.05_0020.g126 | | | + | 247 | 12.9615 | 1.0769 |
| Acey_2012.08.05_0020.g128 | | | + | 170 | 5.6129 | 2.1290 |
| Acey_2012.08.05_0020.g130 | | | + | 199 | 14.1221 | 0.6947 |
| Acey_2012.08.05_0020.g40 | | | | 186 | 0.0239 | 0.2840 |
| Acey_2012.08.05_0020.g41 | | | | 104 | 0.1474 | 0.1859 |
| Acey_2012.08.05_0020.g73 | | | | 102 | 1.0360 | 1.1441 |
| Acey_2012.08.05_0020.g74 | | | | 193 | 23.9796 | 1.3061 |
| Acey_2012.08.05_0020.g78 | | | + | 125 | 0.8333 | 2.7143 |
| Acey_2012.08.05_0022.g496 | | | + | 193 | 1.0455 | 1.0682 |
| Acey_2012.08.05_0023.g742 | + | | + | 154 | 17.8125 | 8.3750 |
| Acey_2012.08.05_0025.g1272 | | + | + | 138 | 0.8333 | 1.0556 |
| Acey_2012.08.05_0031.g2245 | | + | + | 147 | 0.8000 | 1.0667 |
| Acey_2012.08.05_0031.g2246 | | | | 101 | 0.0939 | 0.1155 |
| Acey_2012.08.05_0031.g2249 | | | | 80 | 1.0263 | 1.1316 |
| Acey_2012.08.05_0034.g2844 | | + | + | 155 | 218.1250 | 1.5625 |
| Acey_2012.08.05_0039.g111 | | + | + | 158 | 3.1000 | 1.0000 |
| Acey_2012.08.05_0042.g572 | | | + | 187 | 0.7692 | 33.4615 |
| Acey_2012.08.05_0042.g574 | | + | + | 157 | 0.0774 | 135.6258 |
| Acey_2012.08.05_0042.g709 | | | + | 179 | 0.7692 | 1.0769 |
| Acey_2012.08.05_0042.g717 | | | + | 160 | 0.8000 | 8.5333 |
| Acey_2012.08.05_0043.g842 | | + | + | 149 | 0.2419 | 0.8977 |
| Acey_2012.08.05_0045.g1247 | | + | + | 137 | 17.9444 | 1.1111 |
| Acey_2012.08.05_0046.g1415 | | | | 102 | 1.0000 | 1.1343 |
| Acey_2012.08.05_0046.g1417 | | + | + | 130 | 24.6500 | 8.4000 |
| Acey_2012.08.05_0046.g1420 | | | + | 158 | 1.1875 | 1.0625 |
| Acey_2012.08.05_0064.g3511 | | | + | 225 | 1.7692 | 1.0513 |
| Acey_2012.08.05_0067.g109 | | | | 234 | 1.7158 | 1.4806 |
| Acey_2012.08.05_0067.g115 | | | | 174 | 0.1503 | 1.2197 |
| Acey_2012.08.05_0081.g1423 | | | + | 107 | 1.2833 | 1.1000 |
| Acey_2012.08.05_0081.g1426 | | + | + | 143 | 12.1765 | 1.0588 |
| Acey_2012.08.05_0081.g1427 | | + | + | 156 | 0.7500 | 1.0625 |
| Acey_2012.08.05_0081.g1428 | | | | 242 | 0.7692 | 1.0385 |
| Acey_2012.08.05_0081.g1431 | | + | + | 148 | 0.7647 | 1.0588 |
| Acey_2012.08.05_0081.g1435 | | + | + | 147 | 0.8205 | 2.0000 |
| Acey_2012.08.05_0097.g2983 | | | | 162 | 1.5667 | 1.0667 |
| Acey_2012.08.05_0106.g3732 | | | + | 170 | 1.2192 | 0.3733 |
| Acey_2012.08.05_0106.g3734 | | | + | 172 | 44.1290 | 1.8871 |
| Acey_2012.08.05_0120.g903 | | | | 194 | 555.7381 | 188.7143 |
| Acey_2012.08.05_0123.g1117 | | + | + | 135 | 0.8108 | 2.7027 |
| Acey_2012.08.05_0145.g2468 | | | + | 188 | 3771.5273 | 1100.5182 |
| Acey_2012.08.05_0148.g2676 | | | | 103 | 0.8846 | 1.1154 |
| Acey_2012.08.05_0174.g441 | + | | | 82 | 2.0278 | 1.1389 |
| Acey_2012.08.05_0188.g1150 | | | + | 182 | 0.8475 | 0.5847 |
| Acey_2012.08.05_0201.g1711 | + | + | + | 145 | 10.1765 | 2.5647 |
| Acey_2012.08.05_0201.g1712 | + | | | 138 | 74.7742 | 1.0968 |
| Acey_2012.08.05_0210.g2121 | | | | 67 | 1.2041 | 1.2041 |
| Acey_2012.08.05_0233.g3068 | | + | + | 151 | 0.4819 | 0.4217 |
| Acey_2012.08.05_0233.g3072 | | + | + | 147 | 0.8696 | 1.0870 |
| Acey_2012.08.05_0233.g3073 | | | + | 152 | 2.4527 | 9.5878 |
| Acey_2012.08.05_0234.g3130 | | + | + | 159 | 0.7941 | 1.0588 |
| Acey_2012.08.05_0256.g373 | | | | 151 | 0.8000 | 1.0857 |
| Acey_2012.08.05_0258.g456 | | | | 162 | 1.5625 | 1.0312 |
| Acey_2012.08.05_0283.g1303 | | | | 356 | 0.1079 | 0.1715 |
| Acey_2012.08.05_0283.g1311 | | | | 193 | 6.1636 | 4.8727 |
| Acey_2012.08.05_0287.g1455 | | + | + | 144 | 4.4808 | 0.7115 |
| Acey_2012.08.05_0352.g3266 | | | + | 117 | 23.0000 | 6.5909 |
| Acey_2012.08.05_0357.g3396 | | | + | 223 | 6.3243 | 1.0541 |
| Acey_2012.08.05_0457.g1799 | + | + | | 156 | 21.7500 | 2.0625 |
| Acey_2012.08.05_0457.g1800 | + | + | + | 144 | 0.0613 | 0.5339 |
| Acey_2012.08.05_0457.g1803 | + | | | 126 | 5.3922 | 1.2843 |
| Acey_2012.08.05_0457.g1806 | + | + | + | 145 | 8.3529 | 0.5294 |
| Acey_2012.08.05_0457.g1807 | + | + | + | 144 | 21.7059 | 1.0588 |
| Acey_2012.08.05_0457.g1808 | + | + | + | 172 | 16559.0000 | 6.2759 |
| Acey_2012.08.05_0457.g1809 | + | + | + | 157 | 6.9779 | 2.4044 |
| Acey_2012.08.05_0457.g1810 | + | | | 107 | 0.2200 | 0.2700 |
| Acey_2012.08.05_0457.g1812 | + | | | 75 | 26.2439 | 1.1707 |
| Acey_2012.08.05_0457.g1813 | + | | + | 171 | 1.7063 | 0.5238 |
| Acey_2012.08.05_0473.g2085 | | | | 91 | 182.7419 | 1.1290 |
| Acey_2012.08.05_0473.g2087 | | + | + | 141 | 230.6667 | 15.3404 |
| Acey_2012.08.05_0599.g480 | | + | | 172 | 0.0792 | 0.2755 |
| Acey_2012.08.05_0599.g483 | | + | | 133 | 1.0917 | 2.0734 |
| Acey_2012.08.05_0623.g780 | | + | + | 161 | 0.7812 | 1.0312 |
| Acey_2012.08.05_0659.g1258 | | | | 148 | 0.9571 | 0.5322 |
| Acey_2012.08.05_0659.g1260 | | | + | 165 | 0.0839 | 2.6642 |

[0075] For the 92 ASPR genes in A. ceylanicum, the following are noted: which 21 genes were originally found by OrthoMCL; which 36 could be fully aligned with MUSCLE; which 59 genes were predicted to encode secreted proteins by Phobius; the size of their largest product in amino acids; and their ratios of 24PI/L3i and 24HCM/L3i expression. Most ASPR genes are predicted to encode secreted proteins, and the general trend is for much stronger upregulation during in vivo infection than during in vitro simulated infection.

TABLE 3
Identities of non-A. ceylanicum ASPRs.

| Name | Species | Database | Annotation |
|---|---|---|---|
| Hpol-ASPR-nsp-16 | Heligmosomoides | NCBI-nr | gi\|345499006\|emb\|CCC54335.1\| |
| | polygyrus bakeri | | novel secreted protein 16 |
| Nam-ASPR-065676 | Necator americanus | NEMBASE4 | NAP00098_1 nuclear plus strand |
| | | | Method: p4e−>ESTScan |
| Nam-ASPR-102019 | Necator americanus | NEMBASE4 | NAP01298_1 nuclear plus strand |
| | | | Method: p4e−>ESTScan |
| Oden-ASPR-1074 | Oesophagostomum | Nematode.net | Oden_isotig10740 nuclear minus |
| | dentatum | | strand Method: p4e−>ESTScan |
| Oden-ASPR-10741 | Oesophagostomum | Nematode.net | Oden_isotig10741 nuclear minus |
| | dentatum | | strand Method: p4e−>ESTScan |
| Oden-ASPR-10742 | Oesophagostomum | Nematode.net | Oden_isotig10742 nuclear minus |
| | dentatum | | strand Method: p4e−>ESTScan |
| Oden-ASPR-12576 | Oesophagostomum | Nematode.net | Oden_isotig12576 nuclear plus |
| | dentatum | | strand Method: p4e−>ESTScan |
| Oden-ASPR-12577 | Oesophagostomum | Nematode.net | Oden_isotig12577 nuclear plus |
| | dentatum | | strand Method: p4e−>ESTScan |
| Oden-ASPR-12578 | Oesophagostomum | Nematode.net | Oden_isotig12578 nuclear plus |
| | dentatum | | strand Method: p4e−>ESTScan |
| Oden-ASPR-22809 | Oesophagostomum | Nematode.net | Oden_isotig22809 nuclear minus |
| | dentatum | | strand Method: p4e−>ESTScan |
| Oden-ASPR-23562 | Oesophagostomum | Nematode.net | Oden_isotig23562 nuclear plus |
| | dentatum | | strand Method: p4e−>ESTScan |
| Oden-ASPR-24342 | Oesophagostomum | Nematode.net | Oden_isotig24342 nuclear plus |
| | dentatum | | strand Method: p4e−>ESTScan |
| Oden-ASPR-24659 | Oesophagostomum | Nematode.net | Oden_isotig24659 nuclear plus |
| | dentatum | | strand Method: p4e−>ESTScan |
| Oden-ASPR-25419 | Oesophagostomum | Nematode.net | Oden_isotig25419 nuclear plus |
| | dentatum | | strand Method: p4e−>ESTScan |

[0076] To better define the relationship between ASPRs and ASPs, 91 A. ceylanicum ASPRs were aligned with MUSCLE 3.8.31, and JalView 2.8 was used to select a subset with full-length alignments. In parallel, 499 ASP genes in A. ceylanicum were found to encode one or more of the ASP-associated motifs from Pfam-A or InterPro. As with ASPRs, these 499 ASP genes were aligned, and a subset was selected with full-length alignments. This yielded a group of 36 ASPRs (Table 2) and 235 ASPs from A. ceylanicum that formed full-length alignments. These fully-alignable subsets of ASPRs and ASPs were aligned together, which in turn allows the construction of an evolutionary tree relating these two gene families.

### Example 2

### Identification of Ancylostoma ceylanicum Genes Related to Mammalian Genes

[0077] Example 2 describes a set of genes in Ancylostoma ceylanicum with the following traits, which indicate that their products either might be useful vaccines: their gene products resemble mammalian proteins with immunological functions; they have likely been retained because they confer advantages during parasitism; and several of the genes are strongly upregulated during the establishment of mature infection, between 5 and 12 days after A. ceylanicum infects its host. In one case, an analogous gene is present in the genome of the roundworm Ascaris suum, a close relative of the human parasite A. lumbricoides, and thus is a particularly strong vaccine candidate for both A. ceylanicum and A. lumbricoides. The predicted coding DNA sequences for these A. ceylanicum genes are disclosed in SEQ ID NO:188 to SEQ ID NO:203, which encode amino acid sequences that may serve as useful antigens for preventing or treating a hookworm infection.

[0078] OrthoMCL 1.3 was used to make comparisons of the predicted A. ceylanicum protein-coding genes to those of nine other nematodes (Ascaris suum, Brugia malayi, Bursaphelenchus xylophilus, Caenorhabditis briggsae, Caenorhabditis elegans, Dirofilaria immitis, Meloidogyne hapla, Pristionchus pacificus, and Trichinella spiralis) and those of two mammals (Homo sapiens and Mus musculus). Sources of the proteomes that were examined are listed in Table 4.

TABLE 4
Sources of the nematode and mammalian proteomes that were examined

Ancylostoma ceylanicum (zoonotic hookworm parasite): Proprietary; see Sequence Listing
Ascaris suum (roundworm parasite of pigs, closely related to the human roundworm parasite Ascaris
lumbricoides): ftp://ftp.sanger.ac.uk/pub2/wormbase/releases/WS230/species/a_suum/a_suum.WS230.
protein.fa.gz.
Brugia malayi (parasitic nematode of humans): ftp://ftp.sanger.ac.uk/pub2/wormbase/releases/WS230/
species/b_malayi/b_malayi.WS230.protein.fa.gz.
Bursaphelenchus xylophilus (parasitic nematode of trees): ftp://ftp.sanger.ac.uk/pub2/wormbase/releases/
WS230/species/b_xylophilus/b_xylophilus.WS230.protein.fa.gz.
Caenorhabditis briggsae (non-parasitic nematode, closely related to C. elegans): ftp://ftp.sanger.ac.uk/
pub2/wormbase/releases/WS230/species/c_briggsae/c_briggsae.WS230.protein.fa.gz.
Caenorhabditis elegans (experimentally well-characterized non-parasitic nematode): ftp://ftp.sanger.ac.
uk/pub2/wormbase/releases/WS230/species/c_elegans/c_elegans.WS230.protein.fa.gz.
Dirofilaria immitis (parasitic nematode of dogs): http://nematodes.org/downloads/959nematodegenomes/
blast/db2/nDi.2.2.2.aug.proteins.fasta.gz, dated 07-Aug-2012 12:26.
Homo sapiens: ftp://ftp.ensembl.org/pub/release-70/fasta/homo_sapiens/pep/Homo_sapiens.GRCh37.70.
pep.all.fa.gz, dated 12/19/12.
Meloidogyne hapla (parasitic nematode of plants): ftp://ftp.sanger.ac.uk/pub2/wormbase/releases/WS230/
species/m_hapla/m_hapla.WS230.protein.fa.gz.
Mus musculus: ftp://ftp.ensembl.org/pub/release-70/fasta/mus_musculus/pep/Mus_musculus.GRCm38.
70.pep.all.fa.gz, dated 12/19/12.
Pristionchus pacificus (free-living nematode, closely related to both A. ceylanicum and C. elegans): ftp://
ftp.sanger.ac.uk/pub2/wormbase/releases/WS230/species/p_pacificus/p_pacificus.WS230.protein.fa.gz.
Trichinella spiralis (parasitic nematode of mammals): ftp://ftp.sanger.ac.uk/pub2/wormbase/releases/
WS230/species/t_spiralis/t_spiralis.WS230.protein.fa.gz.

[0079] The A. ceylanicum genes were assessed to determine if any had relatedness with both humans and mice, or with the animal parasites A. suum, B. malayi, D. immitis, or T. spiralis, but not with the free-living nematodes C. elegans, C. briggsae, or P. pacificus (all of which are much more closely related to A. ceylanicum than A. suum), nor with the plant-parasitic nematodes B. xylophilus or M. hapla. Out of 33,243 groups, 52 were identified as similar to mammalian genes. The A. ceylanicum proteins were further examined by BlastP searches of the NCBI non-redundant (NCBI-nr) protein database. In most cases, BlastP showed similarities to C. elegans and other nematodes, and these genes were not considered further. However, eight A. ceylanicum genes were identified as related to vertebrate genes while having no non-parasitic nematode orthologs (Table 5). They fall into three classes based on their most obvious similarities to mammalian proteins: mannose receptors; asialoglycoprotein receptors; and a variety of lectins. Strikingly, all three classes of similarities are to mammalian proteins with C-lectin domains, which are generally involved in binding glycoproteins, endocytosis, and immunological responses.

TABLE 5
Genes in A. ceylanicum and their similarities to mammalian or deuterostome genes.

| | | Size of largest | Up regulation | |
|---|---|---|---|---|
| | Mammalian | isoform | from day | SEQ ID |
| A. ceylanicum gene | similarity | (residues) | 5 to 12 | NO(s) |
| Acey_2012.08.05_0010.g910 | Mannose receptor | 895 | 323-fold | 190; 191; |
| | | | | 192 |
| Acey_2012.08.05_0230.g2988 | Mannose receptor | 869 | 46-fold | 200; 201 |
| Acey_2012.08.05_0004.g2039 | Asialoglycoprotein | 126 | 4-fold | 189 |
| | receptor | | | |
| Acey_2012.08.05_0004.g1962 | Asialoglycoprotein | 166 | 91-fold | 188 |
| | receptor | | | |
| Acey_2012.08.05_0065.g3635 | [Asialoglycoprotein | 291 | 8-fold | 194; 195 |
| | receptor, but weak | | | |
| | match] | | | |
| Acey_2012.08.05_0010.g996 | Neurocan and other | 157 | 154-fold | 193 |
| | chondroitin sulfate | | | |
| | proteoglycans | | | |
| Acey_2012.08.05_0212.g2239 | Macrophage | 224 | 45-fold | 196; 197; |
| | asialoglycoprotein- | | | 198; 199 |
| | binding protein 1- | | | |
| | like, CD209 antigen- | | | |
| | like protein 2-like, | | | |
| | neurocan, etc. | | | |
| Acey_2012.08.05_0517.g2812 | Vertebrate lectin | 165 | 46-fold | 202; 203 |
| | proteins | | | |

[0080] To further determine their possible relevance to infection, the expression profile for all of these A. ceylanicum genes was assessed by RNA-seq analysis at the following infection stages (with A. ceylanicum in golden hamsters): infectious third-stage larvae, before infection (L3i); 24 hours after infection in vivo (in the stomach lining of the hamster); 24 hours after incubation in hookworm culture medium, a commonly used synthetic model of infection; 5 days after infection (5.D); 12 days after infection (12.D); 17 and 19 days after infection (17.D and 19.D). The expression of six of these genes was strongly upregulated from 5.D to 12.D, and remained high thereafter (Table 5). This pattern was found for both mannose receptor-like genes, one asialoglycoprotein receptor-like gene, and three lectin-like genes.

[0081] The mannose receptor-like genes Acey_{—}2012.08.05_{—}0010.g910 and Acey_{—}2012.08.05_{—0230.}g2988 are similar to mammalian mannose receptors (as indicated by BlastP searches and their general organization, with N-terminal signal sequences for secretion followed by five C-lectin domains). In mammals, mannose receptors are expressed in macrophages, are required for normal clearance of glycoproteins, and they are thought to modulate immune responses to fungi and helminths. These receptors belong to a larger superfamily of receptor proteins with four well-known families (mannose receptors MRC1 and MRC2; lymphocyte antigen LY75; and secretory phospholipase A2 receptor PLA2R), along with a fifth family of non-vertebrate deuterostome MRC-like proteins (from acorn worms, lancelets, sea urchins, and sea squirts), termed “MRCL” herein.

### Example 3

### Identification of Ancylostoma ceylanicum Genes that are likely necessary to sustain a Ancylostoma ceylanicum Infection

[0082] Example 3 describes a strategy for identifying those proteins in a parasite genome which are most likely to be generally efficacious, parasite-specific drug targets, and thus, their amino acid sequences may comprise suitable antigens for use in a vaccine. Specifically, those proteins encoded by the Ancylostoma ceylanicum genome are identified that have the following traits: a reasonable likelihood of being inhibited by drugs (“druggable”) and an associated three-dimensional protein structure (enabling rational drug design); required for normal biological function in the experimental nematode Caenorhabditis elegans (with mutant phenotypes, indicating both that the proteins are likely to be required for survival of A. ceylanicum and that assaying the drugs in C. elegans will be straightforward); present in the genome of Ascaris suum, a close relative of the human parasite A. lumbricoides (so that a drug effective against an A. ceylanicum target might also be effective against an A. lumbricoides target, in a human infected with both hookworms and roundworms); absent from the genomes of Homo sapiens and Mus musculus (so that drugs against these proteins are less likely to harm humans or other mammals being treated by the drugs); and, optionally, present in other parasites (so that drugs may have very broad applicability). The identities of the predicted target motifs are disclosed, with predicted coding DNA sequences (SEQ ID NO:204 to SEQ ID NO:404) of the resulting A. ceylanicum target gene products, which encode amino acid sequences that may serve as useful antigens for preventing or treating a hookworm infection.

[0083] The proteome of Ancylostoma ceylanicum was scanned along with a number of other proteomes for instances of protein motifs using two search programs and motif databases: the HMMER 3.0 program with the Pfam-A 26.0 motif database; and the InterProScan 4.8 program with its associated motif database (which includes several public databases) (see FIG. 1).

[0084] First, banned proteomes were searched for instances of motifs, counting any motif to exist in that proteome if it occurred with an E-value of ≦10⁻³. The banned proteomes were the ENSEMBL sequences from release 70 for human beings (Homo sapiens) and mice (Mus musculus). Sources for these and other proteomes are listed in Table 6. Any motif from either Pfam-A or InterPro was disqualified if it had a hit in either banned proteome. Since H. sapiens and M. musculus were the first two mammalian genomes to be sequenced, their gene predictions are of exceptionally high quality; any gene conserved in mammals generally is thus likely to be effectively annotated in either humans or mice, and to be detected in the screen.

TABLE 6
Sources of protein sequences and, where noted, their documentation

Banned proteomes:
Homo sapiens: ftp://ftp.ensembl.org/pub/release-70/fasta/homo_sapiens/pep/Homo_sapiens.GRCh37.70.
pep.all.fa.gz, dated 12/19/12.
Mus musculus: ftp://ftp.ensembl.org/pub/release-70/fasta/mus_musculus/pep/Mus_musculus.GRCm38.
70.pep.all.fa.gz, dated 12/19/12.
Required proteomes:
Ancylostoma ceylanicum (zoonotic hookworm parasite): Proprietary; see Sequence Listing
Ascaris suum (roundworm parasite of pigs, closely related to the human roundworm parasite Ascaris
lumbricoides): ftp://ftp.sanger.ac.uk/pub2/wormbase/releases/WS230/species/a_suum/a_suum.WS230.
protein.fa.gz.
Caenorhabditis briggsae (required only for HMMER 3/Pfam-A searches; non-parasitic nematode, closely
related to C. elegans): ftp://ftp.sanger.ac.uk/pub2/wormbase/releases/WS230/species/c_briggsae/
c_briggsae.WS230.protein.fa.gz.
Caenorhabditis elegans (experimentally well-characterized non-parasitic nematode): ftp://ftp.sanger.ac.
uk/pub2/wormbase/releases/WS230/species/c_elegans/c_elegans.WS230.protein.fa.gz.
The subset of the C. elegans proteins associated with genes having mutant phenotypes in WormBase
WS220 was selected for motif scanning.
ChEMBL 15 (known drug targets): ftp://ftp.ebi.ac.uk/pub/databases/chembl/ChEMBLdb/releases/
chembl_15/chembl_15.fa.gz; dated 1/30/13, 2:14:00 PM.
Documentation: ftp://ftp.ebi.ac.uk/pub/databases/chembl/ChEMBLdb/releases/chembl_15/README,
dated 2/12/13, 9:16:00 AM; ftp://ftp.ebi.ac.uk/pub/databases/chembl/ChEMBLdb/releases/chembl_15/
chembl_15_release_notes.txt, dated 1/30/13 2:36:00 PM; and ftp://ftp.ebi.ac.uk/pub/databases/chembl/
ChEMBLdb/releases/chembl_15/chembl_15_mysql.tar.gz, dated 1/30/13, 2:14:00 PM.
DrugBank 3.0 (known drug targets): All protein sequences: http://www.drugbank.ca/system/downloads/
current/sequences/protein/all_target.fasta.zip; dated 2012-10-21 08:00.
Withdrawn drug targets: http://www.drugbank.ca/system/downloads/current/sequences/protein/
withdrawn_target.fasta.zip; dated 2012-10-21 08:00.
The subset of non-withdrawn drug targets (found in all_target.fasta but not in withdrawn_target.fasta) was
selected from all_target.fasta, and then scanned with motifs.
Documentation: http://www.drugbank.ca/system/downloads/current/drugbank.txt.zip; dated 2012-10-21
01:09.
PDB (proteins with known three-dimensional structures): ftp://ftp.ncbi.nlm.nih.gov/blast/db/FASTA/
pdbaa.gz, dated 2/19/13, 8:22:00 AM.
Pristionchus pacificus (free-living nematode, closely related to both A. ceylanicum and C. elegans): ftp://
ftp.sanger.ac.uk/pub2/wormbase/releases/WS230/species/p_pacificus/p_pacificus.WS230.protein.fa.gz.
Optional proteomes:
Brugia malayi (parasitic nematode of humans): ftp://ftp.sanger.ac.uk/pub2/wormbase/releases/WS230/
species/b_malayi/b_malayi.WS230.protein.fa.gz.
Cryptosporidium parvum (protozoan parasite, causes cryptosporidiosis): http://cryptodb.org/common/
downloads/release-5.0/CparvumIowaII/fasta/data/CryptoDB-5.0_CparvumIowaII_AnnotatedProteins.
fasta, dated 30-Jun-2012 08:12.
Dirofilaria immitis (parasitic nematode of dogs): http://nematodes.org/downloads/959nematodegenomes/
blast/db2/nDi.2.2.2.aug.proteins.fasta.gz, dated 07-Aug-2012 12:26.
Encephalitozoon cuniculi (fungus, intracellular parasite, harmful to immunocompromised humans): http://
microsporidiadb.org/common/downloads/release-3.0/EcuniculiEC1/fasta/data/MicrosporidiaDB-3.
0_EcuniculiEC1_AnnotatedProteins.fasta, dated 30-Jun-2012 08:16.
Entamoeba histolytica (protozoan parasite, causes amoebiasis): http://amoebadb.org/common/downloads/
release-1.7/EhistolyticaHM-1:IMSS/fasta/EhistolyticaHM-1:IMSSAnnotatedProteins_AmoebaDB-1.7.
fasta, dated 30-Jun-2012 08:08.
Giardia lamblia (protozoan parasite, causes giardiasis): http://giardiadb.org/common/downloads/release-
2.5/GintestinalisAssemblageA/fasta/GintestinalisAssemblageAAnnotatedProteins_GiardiaDB-2.5.fasta,
dated 30-Jun-2012 08:13.
Leishmania major (protozoan parasite, causes leishmaniasis): http://tritrypdb.org/common/downloads/
release-4.2/Lmajor/fasta/LmajorFriedlinAnnotatedProteins_TriTrypDB-4.2.fasta, dated 15-Aug-2012
12:54.
Meloidogyne hapla (parasitic nematode of plants): ftp://ftp.sanger.ac.uk/pub2/wormbase/releases/WS230/
species/m_hapla/m_hapla.WS230.protein.fa.gz.
Neospora caninum (protozoan parasite, causes spontaneous abortion in livestock): http://toxodb.org/
common/downloads/release-8.0/NcaninumLIV/fasta/data/ToxoDB-8.
0_NcaninumLIV_AnnotatedProteins.fasta, dated 07-Sep-2012 13:51.
Plasmodium falciparum (protozoan parasite, causes malaria): http://plasmodb.org/common/downloads/
release-9.2/Pfalciparum3D7/fasta/data/PlasmoDB-9.2_Pfalciparum3D7_AnnotatedProteins.fasta, dated
23-Oct-2012 15:18.
Plasmodium vivax (protozoan parasite, causes malaria): http://plasmodb.org/common/downloads/release-
9.2/PvivaxSaI1/fasta/data/PlasmoDB-9.2_PvivaxSaI1_AnnotatedProteins.fasta, dated 15-Oct-2012 15:16.
Schistosoma japonicum (trematode parasite, causes schistosomiasis): http://www.chgc.sh.cn/japonicum/
resource/GeneDB_Sjaponicum.v4.zip, dated 04-Jun-2009 14:54.
Schistosoma mansoni (trematode parasite, causes schistosomiasis): ftp://ftp.sanger.ac.uk/pub/pathogens/
Schistosoma/mansoni/genome/gene_predictions/GeneDB_Smansoni_Proteins.v4.0h.gz, dated 8/12/09.
Toxoplasma gondii (intracellular protozoan parasite): http://toxodb.org/common/downloads/release-8.0/
TgondiiME49/fasta/data/ToxoDB-8.0_TgondiiME49_AnnotatedProteins.fasta, dated 07-Sep-2012 13:51.
Theileria annulata (protozoan parasite, causes tropical theileriosis in livestock): ftp://ftp.sanger.ac.uk/
pub/pathogens/T_annulata/TANN.GeneDB.pep, dated 7/15/05.
Trichinella spiralis (parasitic nematode of mammals): ftp://ftp.sanger.ac.uk/pub2/wormbase/releases/
WS230/species/t_spiralis/t_spiralis.WS230.protein.fa.gz.
Trichomonas vaginalis (protozoan parasite, causes trichomoniasis): http://trichdb.org/common/
downloads/release-1.3/Tvaginalis/fasta/TvaginalisAnnotatedProteins_TrichDB-1.3.fasta, dated 30-Jun-2012 08:27
Trypanosoma brucei (protozoan parasite, causes sleeping sickness): http://tritrypdb.org/common/
downloads/release-4.2/Tbrucei/fasta/Tbrucei427AnnotatedProteins_TriTrypDB-4.2.fasta, dated 15-Aug-
2012 12:56.
Trypanosoma cruzi (protozoan parasite, causes Chagas disease): http://tritrypdb.org/common/downloads/
release-4.2/Tcruzi/fasta/TcruziEsmeraldo-LikeAnnotatedProteins_TriTrypDB-4.2.fasta, dated 15-Aug-
2012 12:57.

[0085] Required proteomes were searched for instances of motifs, counting any motif to exist in that proteome if it occurred with an E-value of ≦10⁻⁶. Any motif which had not already been detected in a banned proteome with E≦10⁻³ was further considered if and only if this motif was detected in all required proteomes at E≦10⁻⁶. The difference between E values for banned versus required was chosen to ensure that false negatives in the banned proteomes were unlikely.

[0086] The required proteomes, for both Pfam-A and InterPro, included the following: A. ceylanicum (nematode, hookworm parasite of humans; sequences taken from the genome analysis); the subset of the C. elegans proteome encoded by genes with mutant phenotypes; Pristionchus pacificus (a free-living experimental nematode like C. elegans, closely related to both A. ceylanicum and C. elegans); ChEMBL 15 or DrugBank 3.0, pooled into a single set of proteins for this analysis (a hit in either contributor to the set was qualifying); the PDB collection of proteins with solved three-dimensional structures; and Ascaris suum (closely related to the human roundworm parasite A. lumbricoides). To accelerate the searches, which for InterProScan could be lengthy, the largest isoform for each gene was generally selected in each proteome. For HMMER 3/Pfam-A searches, Caenorhabditis briggsae (a relative of C. elegans) was also included as a required proteome.

[0087] The subset of the C. elegans proteome encoded by genes with mutant phenotypes was chosen to restrict instances of motifs to those proteins in C. elegans, which are demonstrably required for its biological fitness in vivo. Protein sequences were taken from the WS230 release of WormBase. Mutant phenotypes were taken from the WS220 release of WormBase (which was the latest release for which downloadable phenotypes were available at the time of the analysis) and mapped to their WS230 products by WBGene identifiers. Lethal phenotypes were not required because anthelmintic drugs can be effective without having an overtly lethal phenotype. For instance, the widely used ivermectin class of drugs affects glutamate-gated chloride channels and thus produces paralysis rather than immediate death; yet ivermectins are effective against parasitic nematodes, presumably because they cannot survive in their hosts unless their nervous systems are working normally.

[0088] Another feature of the motif search step, which biased it towards functionally vital proteins, was that motifs were required to exist in at least four different nematode species. Although the limitation does not guarantee that the presence of such a motif is required generally for nematode survival, it does select against any motif easily dispensable for it.

[0089] Third, optional proteomes were searched for instances of motifs which passed both tests above. Optional proteomes were taken from other helminth or protozoan parasites of biomedical significance. These included the following parasitic nematodes: Brugia malayi and Trichinella spiralis. They also included the following trematodes: Schistosoma japonicum and Schistosoma mansoni. Finally, they included the following protozoans: Cryptosporidium parvum; Encephalitozoon cuniculi; Entamoeba histolytica; Giardia lamblia; Leishmania major; Neospora caninum; Plasmodium falciparum; Plasmodium vivax; Toxoplasma gondii; Theileria annulata; Trichomonas vaginalis; Trypanosoma brucei, and Trypanosoma cruzi. For HMMER 3/Pfam-A only, they further included the parasitic nematodes Dirofilaria immitis and Meloidogyne hapla. In all cases, a motif counted as occurring in an optional proteome if it had an E-value of ≦10⁻⁶.

[0090] The resulting motif hits for Pfam-A and InterPro are summarized in Tables 7 and 8, and the predicted A. ceylanicum genes encoding the motifs are listed in Tables 9 and 10.

TABLE 7
PFAM domains selected as indicating possible drug targets

| | | Present in | Present in |
|---|---|---|---|
| PFAM | | obligatory | optional |
| accession no. | Motif name | species | species |
| PF00982.16 | Glyco_transf_20 | A. ceylanicum; | N. caninum; |
| | | C. briggsae; | E. cuniculi; |
| | | C. elegans; | D. immitis; |
| | | P. pacificus; | T. annulata; |
| | | A. suum | T. spiralis; |
| | | | T. gondii; |
| | | | B. malayi; |
| | | | C. parvum |
| PF01674.13 | Lipase_2 | A. ceylanicum; | D. immitis; |
| | | C. briggsae; | B. malayi |
| | | C. elegans; | |
| | | P. pacificus; | |
| | | A. suum | |
| PF02615.9 | Ldh_2 | A. ceylanicum; | T. spiralis; |
| | | C. briggsae; | E. histolytica; |
| | | C. elegans; | S. mansoni; |
| | | P. pacificus; | S. japonicum; |
| | | A. suum | B. malayi |
| PF01493.14 | GXGXG | A. ceylanicum; | T. spiralis; |
| | | C. briggsae; | P. falciparum; |
| | | C. elegans; | P. vivax; |
| | | P. pacificus; | D. immitis; |
| | | A. suum | S. mansoni; |
| | | | S. japonicum; |
| | | | B. malayi |
| PF00463.16 | ICL | A. ceylanicum; | N. caninum; |
| | | C. briggsae; | T. gondii |
| | | C. elegans; | |
| | | P. pacificus; | |
| | | A. suum | |
| PF01274.17 | Malate_synthase | A. ceylanicum; | |
| | | C. briggsae; | |
| | | C. elegans; | |
| | | P. pacificus; | |
| | | A. suum | |
| PF04898.9 | Glu_syn_central | A. ceylanicum; | T. spiralis; |
| | | C. briggsae; | P. falciparum; |
| | | C. elegans; | P. vivax; |
| | | P. pacificus; | D. immitis; |
| | | A. suum | S. mansoni; |
| | | | B. malayi |
| PF06415.8 | iPGM_N | A. ceylanicum; | E. cuniculi; |
| | | C. briggsae; | G. intestinalis; |
| | | C. elegans; | E. histolytica; |
| | | P. pacificus; | T. vaginalis; |
| | | A. suum | T. brucei; |
| | | | D. immitis; |
| | | | T. spiralis; |
| | | | L. major |

TABLE 8
InterPro domains selected as indicating possible drug targets

| | | | Present in | Present in |
|---|---|---|---|---|
| Subsidiary | | | obligatory | optional |
| database | Accession no. | Motif name | species | species |
| HMMPanther | PTHR10788 | TREHALOSE-6- | A. ceylanicum; | N. caninum; |
| | | PHOSPHATE SYNTHASE | C. elegans; | E. cuniculi; |
| | | | P. pacificus; | B. malayi; |
| | | | A. suum | T. gondii; |
| | | | | C. parvum; |
| | | | | T. spiralis; |
| | | | | T. annulata |
| HMMPanther | PTHR11603 | FAMILY NOT NAMED | A. ceylanicum; | T. cruzi; |
| | | | C. elegans; | S. mansoni |
| | | | P. pacificus; | |
| | | | A. suum | |
| HMMPanther | PTHR18945:SF26 | GLUTAMATE-GATED | A. ceylanicum; | B. malayi; |
| | | CHLORIDE CHANNEL | C. elegans; | S. mansoni; |
| | | | P. pacificus; | S. japonicum; |
| | | | A. suum | T. spiralis |
| HMMPfam | PF02615 | Ldh_2 | A. ceylanicum; | B. malayi; |
| | | | C. elegans; | S. mansoni; |
| | | | P. pacificus; | S. japonicum; |
| | | | A. suum | E. histolytica; |
| | | | | T. spiralis |
| HMMPanther | PTHR10314:SF8 | CYSTEINE SYNTHASE | A. ceylanicum; | T. cruzi; |
| | | | C. elegans; | B. malayi; |
| | | | P. pacificus; | T. vaginalis; |
| | | | A. suum | E. histolytica; |
| | | | | L. major |
| HMMTigr | TIGR01139 | cysK: cysteine synthase A | A. ceylanicum; | T. cruzi; |
| | | | C. elegans; | E. histolytica; |
| | | | P. pacificus; | L. major |
| | | | A. suum | |
| Gene3D | G3DSA:1.10.1530.10 | no description | A. ceylanicum; | B. malayi; |
| | | | C. elegans; | S. mansoni; |
| | | | P. pacificus; | S. japonicum; |
| | | | A. suum | E. histolytica; |
| | | | | T. spiralis |
| HMMTigr | TIGR01813 | flavo_cyto_c: | A. ceylanicum; | T. cruzi; |
| | | flavocytochrome c | C. elegans; | B. malayi; |
| | | | P. pacificus; | T. spiralis; |
| | | | A. suum | T. brucei; |
| | | | | L. major |
| HMMPanther | PTHR22893 | FAMILY NOT NAMED | A. ceylanicum; | T. cruzi; |
| | | | C. elegans; | T. vaginalis; |
| | | | P. pacificus; | T. brucei; |
| | | | A. suum | L. major; |
| | | | | G. intestinalis |
| HMMPfam | PF01674 | Lipase_2 | A. ceylanicum; | B. malayi |
| | | | C. elegans; | |
| | | | P. pacificus; | |
| | | | A. suum | |
| HMMPanther | PTHR21266:SF19 | OXIDASE/CHLOROPHYLL | A. ceylanicum; | B. malayi |
| | | SYNTHASE | C. elegans; | |
| | | | P. pacificus; | |
| | | | A. suum | |
| HMMPfam | PF00463 | ICL | A. ceylanicum; | |
| | | | C. elegans; | |
| | | | P. pacificus; | |
| | | | A. suum | |
| HMMPfam | PF01645 | Glu_synthase | A. ceylanicum; | B. malayi; |
| | | | C. elegans; | S. mansoni; |
| | | | P. pacificus; | S. japonicum; |
| | | | A. suum | P. falciparum; |
| | | | | P. vivax; |
| | | | | T. spiralis |
| HMMPanther | PTHR11091 | FAMILY NOT NAMED | A. ceylanicum; | B. malayi; |
| | | | C. elegans; | S. mansoni; |
| | | | P. pacificus; | S. japonicum; |
| | | | A. suum | E. histolytica; |
| | | | | T. spiralis |
| HMMPanther | PTHR11632:SF3 | SUCCINATE | A. ceylanicum; | T. cruzi; |
| | | DEHYDROGENASE 2 | C. elegans; | B. malayi; |
| | | FLAVOPROTEIN | P. pacificus; | T. brucei; |
| | | SUBUNIT | A. suum | L. major |
| HMMPfam | PF01274 | Malate_synthase | A. ceylanicum; | |
| | | | C. elegans; | |
| | | | P. pacificus; | |
| | | | A. suum | |
| HMMPfam | PF01493 | GXGXG | A. ceylanicum; | B. malayi; |
| | | | C. elegans; | S. mansoni; |
| | | | P. pacificus; | S. japonicum; |
| | | | A. suum | P. falciparum; |
| | | | | P. vivax; |
| | | | | T. spiralis |
| HMMPanther | PTHR24076:SF72 | SUBFAMILY NOT | A. ceylanicum; | T. cruzi; |
| | | NAMED | C. elegans; | B. malayi; |
| | | | P. pacificus; | S. mansoni; |
| | | | A. suum | S. japonicum; |
| | | | | T. gondii; |
| | | | | T. brucei; |
| | | | | E. cuniculi; |
| | | | | P. falciparum; |
| | | | | T. spiralis; |
| | | | | T. annulata; |
| | | | | L. major |
| HMMPanther | PTHR21266 | FAMILY NOT NAMED | A. ceylanicum; | B. malayi |
| | | | C. elegans; | |
| | | | P. pacificus; | |
| | | | A. suum | |
| HMMPanther | PTHR21631 | FAMILY NOT NAMED | A. ceylanicum; | N. caninum; |
| | | | C. elegans; | T. cruzi; |
| | | | P. pacificus; | T. gondii |
| | | | A. suum | |
| HMMPanther | PTHR11208:SF8 | KH-DOMAIN RNA | A. ceylanicum; | B. malayi; |
| | | BINDING PROTEIN- | C. elegans; | S. mansoni; |
| | | RELATED | P. pacificus; | S. japonicum; |
| | | | A. suum | T. spiralis |
| HMMPanther | PTHR10169:SF19 | DNA TOPOISOMERASE 2 | A. ceylanicum; | N. caninum; |
| | | | C. elegans; | T. cruzi; |
| | | | P. pacificus; | B. malayi; |
| | | | A. suum | T. gondii; |
| | | | | C. parvum; |
| | | | | T. brucei; |
| | | | | G. intestinalis; |
| | | | | E. cuniculi; |
| | | | | E. histolytica; |
| | | | | P. falciparum; |
| | | | | T. spiralis; |
| | | | | T. annulata; |
| | | | | L. major |
| HMMPanther | PTHR11632:SF5 | SUCCINATE | A. ceylanicum; | N. caninum; |
| | | DEHYDROGENASE 2 | C. elegans; | T. cruzi; |
| | | FLAVOPROTEIN | P. pacificus; | B. malayi; |
| | | SUBUNIT | A. suum | S. mansoni; |
| | | | | S. japonicum; |
| | | | | T. gondii; |
| | | | | P. vivax; |
| | | | | T. brucei; |
| | | | | P. falciparum; |
| | | | | T. spiralis; |
| | | | | T. annulata; |
| | | | | L. major |
| HMMPanther | PTHR11732:SF74 | SUBFAMILY NOT | A. ceylanicum; | N. caninum; |
| | | NAMED | C. elegans; | T. cruzi; |
| | | | P. pacificus; | T. gondii; |
| | | | A. suum | T. brucei; |
| | | | | L. major |
| Gene3D | G3DSA:3.30.1370.60 | no description | A. ceylanicum; | B. malayi; |
| | | | C. elegans; | S. mansoni; |
| | | | P. pacificus; | S. japonicum; |
| | | | A. suum | E. histolytica; |
| | | | | T. spiralis |
| HMMPanther | PTHR21110 | FAMILY NOT NAMED | A. ceylanicum; | B. malayi |
| | | | C. elegans; | |
| | | | P. pacificus; | |
| | | | A. suum | |
| HMMPanther | PTHR24096:SF43 | SUBFAMILY NOT | A. ceylanicum; | B. malayi; |
| | | NAMED | C. elegans; | T. spiralis; |
| | | | P. pacificus; | L. major |
| | | | A. suum | |
| HMMPfam | PF13522 | GATase_6 | A. ceylanicum; | N. caninum; |
| | | | C. elegans; | E. cuniculi; |
| | | | P. pacificus; | B. malayi; |
| | | | A. suum | T. gondii; |
| | | | | P. falciparum; |
| | | | | T. brucei; |
| | | | | L. major |
| Gene3D | G3DSA:2.160.20.60 | no description | A. ceylanicum; | B. malayi; |
| | | | C. elegans; | S. mansoni; |
| | | | P. pacificus; | S. japonicum; |
| | | | A. suum | P. falciparum; |
| | | | | P. vivax; |
| | | | | T. spiralis |
| HMMPanther | PTHR11730 | FAMILY NOT NAMED | A. ceylanicum; | T. cruzi; |
| | | | C. elegans; | B. malayi |
| | | | P. pacificus; | |
| | | | A. suum | |
| HMMPfam | PF04898 | Glu_syn_central | A. ceylanicum; | B. malayi; |
| | | | C. elegans; | S. mansoni; |
| | | | P. pacificus; | P. falciparum; |
| | | | A. suum | P. vivax; |
| | | | | T. spiralis |
| HMMPanther | PTHR23408:SF1 | METHYLMALONYL-COA | A. ceylanicum; | T. spiralis; |
| | | MUTASE | C. elegans; | L. major |
| | | | P. pacificus; | |
| | | | A. suum | |
| superfamily | SSF69336 | Alpha subunit of glutamate | A. ceylanicum; | B. malayi; |
| | | synthase, C-terminal domain | C. elegans; | S. mansoni; |
| | | | P. pacificus; | S. japonicum; |
| | | | A. suum | P. falciparum; |
| | | | | P. vivax; |
| | | | | T. spiralis |
| superfamily | SSF89733 | L-sulfolactate | A. ceylanicum; | B. malayi; |
| | | dehydrogenase-like | C. elegans; | S. mansoni; |
| | | | P. pacificus; | S. japonicum; |
| | | | A. suum | E. histolytica; |
| | | | | T. spiralis |
| Gene3D | G3DSA:3.20.20.360 | no description | A. ceylanicum; | |
| | | | C. elegans; | |
| | | | P. pacificus; | |
| | | | A. suum | |
| HMMPanther | PTHR10788:SF6 | TREHALOSE-6- | A. ceylanicum; | N. caninum; |
| | | PHOSPHATE SYNTHASE | C. elegans; | E. cuniculi; |
| | | | P. pacificus; | B. malayi; |
| | | | A. suum | C. parvum; |
| | | | | T. spiralis; |
| | | | | T. annulata |
| superfamily | SSF51645 | Malate synthase G | A. ceylanicum; | |
| | | | C. elegans; | |
| | | | P. pacificus; | |
| | | | A. suum | |
| HMMTigr | TIGR01136 | cysKM: cysteine synthases | A. ceylanicum; | T. cruzi; |
| | | | C. elegans; | T. vaginalis; |
| | | | P. pacificus; | E. histolytica; |
| | | | A. suum | L. major |

TABLE 9
Drug target-associated PFAM domains
and associated A. ceylanicum genes

| Accession no. | Motif name | A. ceylanicum gene |
|---|---|---|
| PF00463.16 | ICL | Acey_2012.08.05_0003.g1172 |
| PF00982.16 | Glyco_transf_20 | Acey_2012.08.05_0245.g3555 |
| PF00982.16 | Glyco_transf_20 | Acey_2012.08.05_1036.g3463 |
| PF01274.17 | Malate_synthase | Acey_2012.08.05_0003.g1172 |
| PF01274.17 | Malate_synthase | Acey_2012.08.05_0003.g1173 |
| PF01493.14 | GXGXG | Acey_2012.08.05_0223.g2677 |
| PF01674.13 | Lipase_2 | Acey_2012.08.05_0009.g764 |
| PF01674.13 | Lipase_2 | Acey_2012.08.05_0049.g1767 |
| PF01674.13 | Lipase_2 | Acey_2012.08.05_0049.g1854 |
| PF01674.13 | Lipase_2 | Acey_2012.08.05_0101.g3398 |
| PF01674.13 | Lipase_2 | Acey_2012.08.05_0179.g703 |
| PF01674.13 | Lipase_2 | Acey_2012.08.05_0674.g1411 |
| PF02615.9 | Ldh_2 | Acey_2012.08.05_0077.g1140 |
| PF02615.9 | Ldh_2 | Acey_2012.08.05_0099.g3157 |
| PF02615.9 | Ldh_2 | Acey_2012.08.05_0343.g3064 |
| PF02615.9 | Ldh_2 | Acey_2012.08.05_0343.g3065 |
| PF04898.9 | Glu_syn_central | Acey_2012.08.05_0223.g2677 |
| PF06415.8 | iPGM_N | Acey_2012.08.05_0104.g3596 |

TABLE 10
Drug target-associated InterPro domains and associated A. ceylanicum genes

| Subsidiary | | | |
|---|---|---|---|
| database | Accession no. | Motif name | A. ceylanicum gene |
| Gene3D | G3DSA:1.10.1530.10 | no description | Acey_2012.08.05_0077.g1140 |
| Gene3D | G3DSA:1.10.1530.10 | no description | Acey_2012.08.05_0343.g3064 |
| Gene3D | G3DSA:1.10.1530.10 | no description | Acey_2012.08.05_0343.g3065 |
| Gene3D | G3DSA:2.160.20.60 | no description | Acey_2012.08.05_0223.g2677 |
| Gene3D | G3DSA:3.20.20.360 | no description | Acey_2012.08.05_0003.g1172 |
| Gene3D | G3DSA:3.20.20.360 | no description | Acey_2012.08.05_0003.g1173 |
| Gene3D | G3DSA:3.30.1370.60 | no description | Acey_2012.08.05_0077.g1140 |
| Gene3D | G3DSA:3.30.1370.60 | no description | Acey_2012.08.05_0099.g3157 |
| Gene3D | G3DSA:3.30.1370.60 | no description | Acey_2012.08.05_0343.g3064 |
| HMMPanther | PTHR10169:SF19 | DNA TOPOISOMERASE 2 | Acey_2012.08.05_0064.g3495 |
| HMMPanther | PTHR10169:SF19 | DNA TOPOISOMERASE 2 | Acey_2012.08.05_0436.g1438 |
| HMMPanther | PTHR10314:SF8 | CYSTEINE SYNTHASE | Acey_2012.08.05_0002.g728 |
| HMMPanther | PTHR10314:SF8 | CYSTEINE SYNTHASE | Acey_2012.08.05_0491.g2411 |
| HMMPanther | PTHR10788:SF6 | TREHALOSE-6- | Acey_2012.08.05_0042.g665 |
| | | PHOSPHATE SYNTHASE | |
| HMMPanther | PTHR10788:SF6 | TREHALOSE-6- | Acey_2012.08.05_0245.g3555 |
| | | PHOSPHATE SYNTHASE | |
| HMMPanther | PTHR10788:SF6 | TREHALOSE-6- | Acey_2012.08.05_1036.g3463 |
| | | PHOSPHATE SYNTHASE | |
| HMMPanther | PTHR10788 | TREHALOSE-6- | Acey_2012.08.05_0015.g2804 |
| | | PHOSPHATE SYNTHASE | |
| HMMPanther | PTHR10788 | TREHALOSE-6- | Acey_2012.08.05_0042.g665 |
| | | PHOSPHATE SYNTHASE | |
| HMMPanther | PTHR10788 | TREHALOSE-6- | Acey_2012.08.05_0042.g671 |
| | | PHOSPHATE SYNTHASE | |
| HMMPanther | PTHR10788 | TREHALOSE-6- | Acey_2012.08.05_0245.g3555 |
| | | PHOSPHATE SYNTHASE | |
| HMMPanther | PTHR10788 | TREHALOSE-6- | Acey_2012.08.05_1036.g3463 |
| | | PHOSPHATE SYNTHASE | |
| HMMPanther | PTHR11091 | FAMILY NOT NAMED | Acey_2012.08.05_0077.g1140 |
| HMMPanther | PTHR11091 | FAMILY NOT NAMED | Acey_2012.08.05_0099.g3157 |
| HMMPanther | PTHR11091 | FAMILY NOT NAMED | Acey_2012.08.05_0343.g3064 |
| HMMPanther | PTHR11091 | FAMILY NOT NAMED | Acey_2012.08.05_0343.g3065 |
| HMMPanther | PTHR11208:SF8 | KH-DOMAIN RNA | Acey_2012.08.05_0027.g1517 |
| | | BINDING PROTEIN- | |
| | | RELATED | |
| HMMPanther | PTHR11208:SF8 | KH-DOMAIN RNA | Acey_2012.08.05_0217.g2408 |
| | | BINDING PROTEIN- | |
| | | RELATED | |
| HMMPanther | PTHR11208:SF8 | KH-DOMAIN RNA | Acey_2012.08.05_0293.g1600 |
| | | BINDING PROTEIN- | |
| | | RELATED | |
| HMMPanther | PTHR11208:SF8 | KH-DOMAIN RNA | Acey_2012.08.05_0347.g3147 |
| | | BINDING PROTEIN- | |
| | | RELATED | |
| HMMPanther | PTHR11208:SF8 | KH-DOMAIN RNA | Acey_2012.08.05_0363.g3530 |
| | | BINDING PROTEIN- | |
| | | RELATED | |
| HMMPanther | PTHR11603 | FAMILY NOT NAMED | Acey_2012.08.05_0031.g2261 |
| HMMPanther | PTHR11603 | FAMILY NOT NAMED | Acey_2012.08.05_0266.g730 |
| HMMPanther | PTHR11603 | FAMILY NOT NAMED | Acey_2012.08.05_0266.g731 |
| HMMPanther | PTHR11632:SF3 | SUCCINATE | Acey_2012.08.05_0011.g1461 |
| | | DEHYDROGENASE 2 | |
| | | FLAVOPROTEIN | |
| | | SUBUNIT | |
| HMMPanther | PTHR11632:SF5 | SUCCINATE | Acey_2012.08.05_0015.g2818 |
| | | DEHYDROGENASE 2 | |
| | | FLAVOPROTEIN | |
| | | SUBUNIT | |
| HMMPanther | PTHR11730 | FAMILY NOT NAMED | Acey_2012.08.05_0004.g1856 |
| HMMPanther | PTHR11730 | FAMILY NOT NAMED | Acey_2012.08.05_0034.g2831 |
| HMMPanther | PTHR11730 | FAMILY NOT NAMED | Acey_2012.08.05_0086.g1948 |
| HMMPanther | PTHR11730 | FAMILY NOT NAMED | Acey_2012.08.05_0151.g2816 |
| HMMPanther | PTHR11730 | FAMILY NOT NAMED | Acey_2012.08.05_0315.g2266 |
| HMMPanther | PTHR11732:SF74 | SUBFAMILY NOT NAMED | Acey_2012.08.05_0059.g2970 |
| HMMPanther | PTHR11732:SF74 | SUBFAMILY NOT NAMED | Acey_2012.08.05_0059.g2971 |
| HMMPanther | PTHR11732:SF74 | SUBFAMILY NOT NAMED | Acey_2012.08.05_0900.g2951 |
| HMMPanther | PTHR18945:SF26 | GLUTAMATE-GATED | Acey_2012.08.05_0036.g3261 |
| | | CHLORIDE CHANNEL | |
| HMMPanther | PTHR18945:SF26 | GLUTAMATE-GATED | Acey_2012.08.05_0036.g3305 |
| | | CHLORIDE CHANNEL | |
| HMMPanther | PTHR18945:SF26 | GLUTAMATE-GATED | Acey_2012.08.05_0080.g1380 |
| | | CHLORIDE CHANNEL | |
| HMMPanther | PTHR18945:SF26 | GLUTAMATE-GATED | Acey_2012.08.05_0096.g2944 |
| | | CHLORIDE CHANNEL | |
| HMMPanther | PTHR18945:SF26 | GLUTAMATE-GATED | Acey_2012.08.05_0247.g67 |
| | | CHLORIDE CHANNEL | |
| HMMPanther | PTHR18945:SF26 | GLUTAMATE-GATED | Acey_2012.08.05_0348.g3183 |
| | | CHLORIDE CHANNEL | |
| HMMPanther | PTHR18945:SF26 | GLUTAMATE-GATED | Acey_2012.08.05_0348.g3184 |
| | | CHLORIDE CHANNEL | |
| HMMPanther | PTHR18945:SF26 | GLUTAMATE-GATED | Acey_2012.08.05_0445.g1589 |
| | | CHLORIDE CHANNEL | |
| HMMPanther | PTHR18945:SF26 | GLUTAMATE-GATED | Acey_2012.08.05_0455.g1763 |
| | | CHLORIDE CHANNEL | |
| HMMPanther | PTHR18945:SF26 | GLUTAMATE-GATED | Acey_2012.08.05_0455.g1764 |
| | | CHLORIDE CHANNEL | |
| HMMPanther | PTHR21110 | FAMILY NOT NAMED | Acey_2012.08.05_0104.g3596 |
| HMMPanther | PTHR21266 | FAMILY NOT NAMED | Acey_2012.08.05_0189.g1175 |
| HMMPanther | PTHR21266:SF19 | OXIDASE/CHLOROPHYLL | Acey_2012.08.05_0189.g1175 |
| | | SYNTHASE | |
| HMMPanther | PTHR21631 | FAMILY NOT NAMED | Acey_2012.08.05_0003.g1172 |
| HMMPanther | PTHR21631 | FAMILY NOT NAMED | Acey_2012.08.05_0003.g1173 |
| HMMPanther | PTHR22893 | FAMILY NOT NAMED | Acey_2012.08.05_0004.g2159 |
| HMMPanther | PTHR22893 | FAMILY NOT NAMED | Acey_2012.08.05_0019.g3945 |
| HMMPanther | PTHR22893 | FAMILY NOT NAMED | Acey_2012.08.05_0035.g3099 |
| HMMPanther | PTHR22893 | FAMILY NOT NAMED | Acey_2012.08.05_0035.g3101 |
| HMMPanther | PTHR22893 | FAMILY NOT NAMED | Acey_2012.08.05_0035.g3102 |
| HMMPanther | PTHR22893 | FAMILY NOT NAMED | Acey_2012.08.05_0035.g3103 |
| HMMPanther | PTHR22893 | FAMILY NOT NAMED | Acey_2012.08.05_0041.g434 |
| HMMPanther | PTHR22893 | FAMILY NOT NAMED | Acey_2012.08.05_0041.g436 |
| HMMPanther | PTHR22893 | FAMILY NOT NAMED | Acey_2012.08.05_0081.g1458 |
| HMMPanther | PTHR22893 | FAMILY NOT NAMED | Acey_2012.08.05_0081.g1460 |
| HMMPanther | PTHR22893 | FAMILY NOT NAMED | Acey_2012.08.05_0351.g3233 |
| HMMPanther | PTHR22893 | FAMILY NOT NAMED | Acey_2012.08.05_0351.g3234 |
| HMMPanther | PTHR22893 | FAMILY NOT NAMED | Acey_2012.08.05_0351.g3237 |
| HMMPanther | PTHR22893 | FAMILY NOT NAMED | Acey_2012.08.05_0370.g104 |
| HMMPanther | PTHR23408:SF1 | METHYLMALONYL-COA | Acey_2012.08.05_0012.g1610 |
| | | MUTASE | |
| HMMPanther | PTHR24076:SF72 | SUBFAMILY NOT NAMED | Acey_2012.08.05_0476.g2142 |
| HMMPanther | PTHR24096:SF43 | SUBFAMILY NOT NAMED | Acey_2012.08.05_0046.g1352 |
| HMMPanther | PTHR24096:SF43 | SUBFAMILY NOT NAMED | Acey_2012.08.05_0062.g3312 |
| HMMPanther | PTHR24096:SF43 | SUBFAMILY NOT NAMED | Acey_2012.08.05_0064.g3544 |
| HMMPanther | PTHR24096:SF43 | SUBFAMILY NOT NAMED | Acey_2012.08.05_0227.g2815 |
| HMMPanther | PTHR24096:SF43 | SUBFAMILY NOT NAMED | Acey_2012.08.05_0227.g2821 |
| HMMPanther | PTHR24096:SF43 | SUBFAMILY NOT NAMED | Acey_2012.08.05_0288.g1479 |
| HMMPanther | PTHR24096:SF43 | SUBFAMILY NOT NAMED | Acey_2012.08.05_0288.g1482 |
| HMMPanther | PTHR24096:SF43 | SUBFAMILY NOT NAMED | Acey_2012.08.05_0288.g1483 |
| HMMPanther | PTHR24096:SF43 | SUBFAMILY NOT NAMED | Acey_2012.08.05_0478.g2202 |
| HMMPanther | PTHR24096:SF43 | SUBFAMILY NOT NAMED | Acey_2012.08.05_0478.g2203 |
| HMMPfam | PF00463 | ICL | Acey_2012.08.05_0003.g1172 |
| HMMPfam | PF01274 | Malate_synthase | Acey_2012.08.05_0003.g1172 |
| HMMPfam | PF01274 | Malate_synthase | Acey_2012.08.05_0003.g1173 |
| HMMPfam | PF01493 | GXGXG | Acey_2012.08.05_0223.g2677 |
| HMMPfam | PF01645 | Glu_synthase | Acey_2012.08.05_0223.g2677 |
| HMMPfam | PF01674 | Lipase_2 | Acey_2012.08.05_0009.g764 |
| HMMPfam | PF01674 | Lipase_2 | Acey_2012.08.05_0049.g1767 |
| HMMPfam | PF01674 | Lipase_2 | Acey_2012.08.05_0049.g1854 |
| HMMPfam | PF01674 | Lipase_2 | Acey_2012.08.05_0101.g3398 |
| HMMPfam | PF01674 | Lipase_2 | Acey_2012.08.05_0179.g703 |
| HMMPfam | PF01674 | Lipase_2 | Acey_2012.08.05_0674.g1411 |
| HMMPfam | PF02615 | Ldh_2 | Acey_2012.08.05_0077.g1140 |
| HMMPfam | PF02615 | Ldh_2 | Acey_2012.08.05_0099.g3157 |
| HMMPfam | PF02615 | Ldh_2 | Acey_2012.08.05_0343.g3064 |
| HMMPfam | PF02615 | Ldh_2 | Acey_2012.08.05_0343.g3065 |
| HMMPfam | PF04898 | Glu_syn_central | Acey_2012.08.05_0223.g2677 |
| HMMPfam | PF13522 | GATase_6 | Acey_2012.08.05_0021.g387 |
| HMMPfam | PF13522 | GATase_6 | Acey_2012.08.05_0024.g889 |
| HMMPfam | PF13522 | GATase_6 | Acey_2012.08.05_0129.g1478 |
| HMMTigr | TIGR01136 | cysKM: cysteine synthases | Acey_2012.08.05_0002.g728 |
| HMMTigr | TIGR01136 | cysKM: cysteine synthases | Acey_2012.08.05_0491.g2411 |
| HMMTigr | TIGR01139 | cysK: cysteine synthase A | Acey_2012.08.05_0002.g728 |
| HMMTigr | TIGR01139 | cysK: cysteine synthase A | Acey_2012.08.05_0491.g2411 |
| HMMTigr | TIGR01813 | flavo_cyto_c: | Acey_2012.08.05_0011.g1461 |
| | | flavocytochrome c | |
| superfamily | SSF51645 | Malate synthase G | Acey_2012.08.05_0003.g1172 |
| superfamily | SSF51645 | Malate synthase G | Acey_2012.08.05_0003.g1173 |
| superfamily | SSF69336 | Alpha subunit of glutamate | Acey_2012.08.05_0223.g2677 |
| | | synthase, C-terminal domain | |
| superfamily | SSF89733 | L-sulfolactate | Acey_2012.08.05_0077.g1140 |
| | | dehydrogenase-like | |
| superfamily | SSF89733 | L-sulfolactate | Acey_2012.08.05_0099.g3157 |
| | | dehydrogenase-like | |
| superfamily | SSF89733 | L-sulfolactate | Acey_2012.08.05_0343.g3064 |
| | | dehydrogenase-like | |
| superfamily | SSF89733 | L-sulfolactate | Acey_2012.08.05_0343.g3065 |
| | | dehydrogenase-like | |

### Example 4

### Identification of Ancylostoma ceylanicum Protease and Protease Inhibitor Genes

[0091] Example 4 describes a repertoire of proteases and protease inhibitors in Ancylostoma ceylanicum. They have the following traits, which indicate that their products might be useful for vaccines: they are strongly upregulated at the onset of A. ceylanicum infection in vivo; and they are evolutionarily specific to worms, rather than being strongly related to proteins in mammals. The DNA sequences for these genes are disclosed in SEQ ID NOS:405-540, which encode amino acid sequences that may serve as useful antigens for preventing or treating a hookworm infection. To identify which genes were specifically activated during early infection, A. ceylanicum expression profiles were assessed by RNA-seq analysis with RSEM 1.2.0 of the following infection stages (with A. ceylanicum in golden hamsters): infectious third-stage larvae, before infection (L3i); 24 hours after infection in vivo (in the stomach lining of the hamster; 24PI); 24 hours after incubation in hookworm culture medium, a commonly used synthetic model of infection (24HCM); 5 days after infection (5.D); 12 days after infection (12.D); 17 and 19 days after infection (17.D and 19.D). Expression levels were calculated in transcripts per million (TPM), which allows gene activities to be measured by a fixed standard and compared impartially between differently developmental stages, conditions, or even different organisms. Genes were ranked by their ratios of expression (later stage TPM/earlier stage TPM).

[0092] A. ceylanicum genes were classified both by known protein motifs (through HMMER 3.0/Pfam-A 26 and InterProScan 4.8, and by evolutionary relationships to genes in different species (through OrthoMCL 1.3). For OrthoMCL, the predicted A. ceylanicum protein-coding genes were evolutionarily compared to those of nine other nematodes (Ascaris suum, Brugia malayi, Bursaphelenchus xylophilus, Caenorhabditis elegans, C. briggsae, Dirofilaria immitis, Meloidogyne hapla, Pristionchus pacificus, and Trichinella spiralis), and to those of two mammals from Ensembl release 70 (Homo sapiens and Mus musculus). Sources of the proteomes that were examined are listed in Table 11.

TABLE 11
Sources of the nematode and mammalian proteomes that were
compared to define orthology groups in A. ceylanicum.

Ancylostoma ceylanicum (zoonotic hookworm parasite): Proprietary; see Sequence Listing
Ascaris suum (roundworm parasite of pigs, closely related to the human roundworm parasite Ascaris
lumbricoides): ftp://ftp.sanger.ac.uk/pub2/wormbase/releases/WS230/species/a_suum/a_suum.WS230.
protein.fa.gz.
Brugia malayi (parasitic nematode of humans): ftp://ftp.sanger.ac.uk/pub2/wormbase/releases/WS230/
species/b_malayi/b_malayi.WS230.protein.fa.gz.
Bursaphelenchus xylophilus (parasitic nematode of trees): ftp://ftp.sanger.ac.uk/pub2/wormbase/releases/
WS230/species/b_xylophilus/b_xylophilus.WS230.protein.fa.gz.
Caenorhabditis briggsae (non-parasitic nematode, closely related to C. elegans): ftp://ftp.sanger.ac.uk/
pub2/wormbase/releases/WS230/species/c_briggsae/c_briggsae.WS230.protein.fa.gz.
Caenorhabditis elegans (experimentally well-characterized non-parasitic nematode): ftp://ftp.sanger.ac.
uk/pub2/wormbase/releases/WS230/species/c_elegans/c_elegans.WS230.protein.fa.gz.
Dirofilaria immitis (parasitic nematode of dogs): http://nematodes.org/downloads/959nematodegenomes/
blast/db2/nDi.2.2.2.aug.proteins.fasta.gz, dated 07-Aug-2012 12:26.
Homo sapiens: ftp://ftp.ensembl.org/pub/release-70/fasta/homo_sapiens/pep/Homo_sapiens.GRCh37.70.
pep.all.fa.gz, dated 12/19/12.
Meloidogyne hapla (parasitic nematode of plants): ftp://ftp.sanger.ac.uk/pub2/wormbase/releases/WS230/
species/m_hapla/m_hapla.WS230.protein.fa.gz.
Mus musculus: ftp://ftp.ensembl.org/pub/release-70/fasta/mus_musculus/pep/Mus_musculus.GRCm38.
70.pep.all.fa.gz, dated 12/19/12.
Pristionchus pacificus (free-living nematode, closely related to both A. ceylanicum and C. elegans): ftp://
ftp.sanger.ac.uk/pub2/wormbase/releases/WS230/species/p_pacificus/p_pacificus.WS230.protein.fa.gz.
Trichinella spiralis (parasitic nematode of mammals): ftp://ftp.sanger.ac.uk/pub2/wormbase/releases/
WS230/species/t_spiralis/t_spiralis.WS230.protein.fa.gz.

[0093] To link the biological functions of genes to steps of hookworm infection, Pfam-A and InterPro motifs were used to assign Gene Ontology (GO) terms to each A. ceylanicum gene with Blast2GO 2.5 (build 23092011). InterProScan and Blast2GO were performed as in Kumar, 2012 (https://githubcom/sujaikumar/assemblage/blob/master/README-annotationmd#how-to-predict-genes-using-a-two-pass-iterative-maker2-workflow); in particular, for Blast2GO, both InterProScan predictions and BlastP results were used against an animal-specific subset of NCBI's nr database.

[0094] Having ranked genes by expression ratios and assigned them GO terms, FUNC 0.4.5 was used to compute which GO terms were significantly overrepresented among genes upregulated from L3i to 24PI. Among the overrepresented GO terms, terms for both proteases and protease inhibitors were observed (Table 12).

TABLE 12
A subset of Gene Ontology (GO) terms disproportionately
associated with genes in A. ceylanicum upregulated
in early infection (from L3i to 24PI).

| ID number | Description | q-value |
|---|---|---|
| GO:0004197 | cysteine-type endopeptidase activity | 3.55271e−15 |
| GO:0004867 | serine-type endopeptidase inhibitor activity | 5.82112e−12 |
| GO:0004222 | metalloendopeptidase activity | 1.09247e−08 |
| GO:0004190 | aspartic-type endopeptidase activity | 1.45201e−06 |
| GO:0008236 | serine-type peptidase activity | 2.32024e−05 |
| GO:0004252 | serine-type endopeptidase activity | 0.000295668 |

[0095] At the same time, genes that were significantly upregulated from L3i to 24PI were identified with edgeR 3.0.8, using a set of 406 constitutively expressed genes to estimate a biological dispersion of 0.24339 for gene expression between samples. With this dispersion, 1,146 genes were identified as significantly upregulated (with a q-value of 0.001). In contrast, only 108 genes were observed to be significantly upregulated in hookworm culture medium (i.e., from L3i to 24HCM), indicating the greater ability of infection in vivo to elicit gene activity in A. ceylanicum.

[0096] A. ceylanicum genes were identified which had all of the following traits: they were annotated for the GO terms; they were significantly upregulated from L3i to 24PI; and they did not belong to an orthology group that included mammalian proteins (from humans or mice). This yielded a group of 48 genes encoding hookworm-specific, infection-induced proteases (Table 13) and 7 genes encoding hookworm-specific, infection-induced protease inhibitors (Table 14).

TABLE 13
A. ceylanicum genes that are significantly upregulated in early infection (from
L3i to 24PI) and encode proteases that lack obvious homology to mammalian proteins.

| Gene | q-value* | Secreted | GO terms |
|---|---|---|---|
| Acey_2012.08.05_0154.g2957 | 2.5561327735976e−13 | + | cysteine-type endopeptidase activity |
| | | | [GO:0004197] |
| Acey_2012.08.05_0195.g1496 | 9.32379466686754e−13 | + | aspartic-type endopeptidase activity |
| | | | [GO:0004190] |
| Acey_2012.08.05_0183.g967 | 1.10100549778176e−12 | + | aspartic-type endopeptidase activity |
| | | | [GO:0004190] |
| Acey_2012.08.05_0154.g2956 | 1.77119938965992e−12 | | cysteine-type endopeptidase activity |
| | | | [GO:0004197] |
| Acey_2012.08.05_0195.g1499 | 4.051972903713e−11 | + | aspartic-type endopeptidase activity |
| | | | [GO:0004190] |
| Acey_2012.08.05_0154.g2968 | 7.16663927409038e−11 | + | cysteine-type endopeptidase activity |
| | | | [GO:0004197] |
| Acey_2012.08.05_0195.g1495 | 3.54332330455291e−09 | | aspartic-type endopeptidase activity |
| | | | [GO:0004190] |
| Acey_2012.08.05_0081.g1454 | 3.70155439027392e−09 | + | serine-type endopeptidase activity |
| | | | [GO:0004252] |
| Acey_2012.08.05_0195.g1502 | 3.51337433723627e−08 | + | aspartic-type endopeptidase activity |
| | | | [GO:0004190] |
| Acey_2012.08.05_0154.g3018 | 5.90600573076656e−08 | + | cysteine-type endopeptidase activity |
| | | | [GO:0004197] |
| Acey_2012.08.05_0195.g1491 | 8.39644714676855e−08 | | aspartic-type endopeptidase activity |
| | | | [GO:0004190] |
| Acey_2012.08.05_0273.g978 | 1.76487169092424e−07 | | metalloendopeptidase activity |
| | | | [GO:0004222] |
| Acey_2012.08.05_0154.g3016 | 7.51995037789084e−07 | + | cysteine-type endopeptidase activity |
| | | | [GO:0004197] |
| Acey_2012.08.05_0035.g3090 | 1.19541843568679e−06 | | serine-type peptidase activity |
| | | | [GO:0008236] |
| Acey_2012.08.05_0273.g992 | 1.476389860405796−06 | | metalloendopeptidase activity |
| | | | [GO:0004222] |
| Acey_2012.08.05_0619.g730 | 2.76040711398016e−06 | | cysteine-type endopeptidase activity |
| | | | [GO:0004197] |
| Acey_2012.08.05_0154.g2959 | 3.39600112623981e−06 | | cysteine-type endopeptidase activity |
| | | | [GO:0004197] |
| Acey_2012.08.05_0154.g2994 | 5.61369790561758e−06 | | cysteine-type endopeptidase activity |
| | | | [GO:0004197] |
| Acey_2012.08.05_0001.g145 | 1.05261873942301e−05 | + | metalloendopeptidase activity |
| | | | [GO:0004222] |
| Acey_2012.08.05_0258.g432 | 1.33802259147134e−05 | | aspartic-type endopeptidase activity |
| | | | [GO:0004190] |
| Acey_2012.08.05_0007.g3467 | 1.66432960626729e−05 | | cysteine-type endopeptidase activity |
| | | | [GO:0004197] |
| Acey_2012.08.05_0099.g3207 | 2.44344788769675e−05 | + | metalloendopeptidase activity |
| | | | [GO:0004222] |
| Acey_2012.08.05_0004.g1998 | 2.5688646986668e−05 | + | aspartic-type endopeptidase activity |
| | | | [GO:0004190] |
| Acey_2012.08.05_0010.g870 | 2.5688646986668e−05 | + | metalloendopeptidase activity |
| | | | [GO:0004222] |
| Acey_2012.08.05_0154.g3014 | 3.20320683408809e−05 | | cysteine-type endopeptidase activity |
| | | | [GO:0004197] |
| Acey_2012.08.05_0781.g2301 | 6.19309251932648e−05 | | aspartic-type endopeptidase activity |
| | | | [GO:0004190] |
| Acey_2012.08.05_0103.g3579 | 6.80585558556827e−05 | | serine-type endopeptidase activity |
| | | | [GO:0004252] |
| Acey_2012.08.05_0048.g1548 | 9.75483227451861e−05 | | serine-type peptidase activity |
| | | | [GO:0008236] |
| Acey_2012.08.05_0641.g1028 | 0.000108178832755462 | | metalloendopeptidase activity |
| | | | [GO:0004222] |
| Acey_2012.08.05_0154.g3007 | 0.000110274586983036 | + | cysteine-type endopeptidase activity |
| | | | [GO:0004197] |
| Acey_2012.08.05_0273.g989 | 0.00012602789625187 | | metalloendopeptidase activity |
| | | | [GO:0004222] |
| Acey_2012.08.05_0195.g1489 | 0.000132057626602926 | + | aspartic-type endopeptidase activity |
| | | | [GO:0004190] |
| Acey_2012.08.05_0195.g1490 | 0.000147000668090609 | | aspartic-type endopeptidase activity |
| | | | [GO:0004190] |
| Acey_2012.08.05_0288.g1485 | 0.000151166165541015 | | serine-type peptidase activity |
| | | | [GO:0008236] |
| Acey_2012.08.05_0028.g1777 | 0.000192264887352063 | | cysteine-type endopeptidase activity |
| | | | [GO:0004197]; cysteine-type |
| | | | endopeptidase inhibitor activity |
| | | | [GO:0004869] |
| Acey_2012.08.05_0220.g2503 | 0.00027036875982883 | + | cysteine-type endopeptidase activity |
| | | | [GO:0004197] |
| Acey_2012.08.05_0247.g51 | 0.000344982367250545 | | cysteine-type endopeptidase activity |
| | | | [GO:0004197] |
| Acey_2012.08.05_0038.g3641 | 0.000399488164035572 | | metalloendopeptidase activity |
| | | | [GO:0004222] |
| Acey_2012.08.05_0038.g3645 | 0.000497062972299171 | | metalloendopeptidase activity |
| | | | [GO:0004222] |
| Acey_2012.08.05_0010.g888 | 0.000645621348658581 | | metalloendopeptidase activity |
| | | | [GO:0004222] |
| Acey_2012.08.05_0144.g2437 | 0.000673566965394102 | | cysteine-type endopeptidase activity |
| | | | [GO:0004197] |
| Acey_2012.08.05_0195.g1492 | 0.000704720293510121 | | aspartic-type endopeptidase activity |
| | | | [GO:0004190] |
| Acey_2012.08.05_0001.g224 | 0.000772064015632964 | + | metalloendopeptidase activity |
| | | | [GO:0004222] |
| Acey_2012.08.05_0173.g421 | 0.000782307702805552 | | serine-type peptidase activity |
| | | | [GO:0008236] |
| Acey_2012.08.05_0195.g1494 | 0.000839763966008027 | + | aspartic-type endopeptidase activity |
| | | | [GO:0004190] |
| Acey_2012.08.05_0619.g718 | 0.000863173922670397 | + | cysteine-type endopeptidase activity |
| | | | [GO:0004197] |
| Acey_2012.08.05_0230.g2983 | 0.000891216697808933 | | metalloendopeptidase activity |
| | | | [GO:0004222] |
| Acey_2012.08.05_0018.g3533 | 0.000921383010005993 | | cysteine-type endopeptidase activity |
| | | | [GO:0004197] |

*Significance of upregulation from L3i to 24.PI was computed by edgeR; smaller q-values denote more pronounced upregulation.
+ Predicted by Phobius to be secreted

TABLE 14
Genes in A. ceylanicum that are significantly upregulated in
early infection (from L3i to 24PI) which encode protease inhibitors,
and which lack obvious homology to mammalian proteins.

| Gene | q-value | Secreted |
|---|---|---|
| Acey_2012.08.05_0056.g2712 | 9.77697175251355e−08 | + |
| Acey_2012.08.05_0833.g2587 | 8.38157936771835e−07 | + |
| Acey_2012.08.05_0010.g1216 | 5.99507919103354e−06 | + |
| Acey_2012.08.05_0016.g3109 | 0.000206283167326564 | |
| Acey_2012.08.05_0005.g2371 | 0.000386869470360868 | + |
| Acey_2012.08.05_0016.g3111 | 0.000486601741317141 | + |
| Acey_2012.08.05_0016.g3121 | 0.000645621348658581 | |

The significance of upregulation from L3i to 24.PI was computed by edgeR; smaller q-values denote more pronounced upregulation. Genes whose products are predicted by Phobius to be secreted are noted with ‘+’.

### EQUIVALENTS

[0097] Those skilled in the art will recognize, or be able to ascertain using no more than routine experimentation, many equivalents to the specific embodiments of the invention described herein. Such equivalents are intended to be encompassed by the following claims.

The application's sequence listing, which the Patent Office published only in electronic form, follows.

SEQUENCE LISTING (540 sequences)

SEQ ID NO: 1 - DNA, 258 bp, Ancylostoma ceylanicum
atgtacgactgtggcctcgaaaacgaagcaatgcacggcatctcattctacggcggcttcctcctggatcgctttaagggcgcctcctacaactatttcacaagaaaatatcccgaaagtgagcgagtgaggaacgtgatcaatgacgctgtcgaatcttggaaaggagatctcaaagagatgcagacgaaaacgcgattcggctgcaattaccgcgtcaacaacttagtctacagtgtactatgtacttacgcctga

SEQ ID NO: 2 - DNA, 417 bp, Ancylostoma ceylanicum
atgtcgctcatgctttcttggcatgtacttagtatggttaccaccgttgccctgtcaaagagctacgcaccagaatgtccggaacttcttttcggcggaatagctcaatttgcaaggagaaatttcgttgaagttatggaggagacacatccaggattaatgtacgactgtggcctcgaaaacgaagcaatgcacggcatctcattctacggcggcttcctcctggatcgctttaagggcgcctcctacaactatttcacaagaaaatatcccgaaagtgagcgagtgaggaacgtgatcaatgacgctgtcgaatcttggaaaggagatctcaaagagatgcagacgaaaacgcgattcggctgcaattaccgcgtcaacaacttagtctacagtgtactatgtacttacgcctga

SEQ ID NO: 3 - DNA, 408 bp, Ancylostoma ceylanicum
atgctttcttggcatgtacttagtatggttaccaccgttgccctgtcaaagagctacgcaccagaatgtccggaacttcttttcggcggaatagctcaatttgcaaggagaaatttcgttgaagttatggaggagacacatccaggattaatgtacgactgtggcctcgaaaacgaagcaatgcacggcatctcattctacggcggcttcctcctggatcgctttaagggcgcctcctacaactatttcacaagaaaatatcccgaaagtgagcgagtgaggaacgtgatcaatgacgctgtcgaatcttggaaaggagatctcaaagagatgcagacgaaaacgcgattcggctgcaattaccgcgtcaacaacttagtctacagtgtactatgtacttacgcctga

SEQ ID NO: 4 - DNA, 462 bp, Ancylostoma ceylanicum
atggctgcacttactttcacatggatggttttttgtgtgcttccacacctactgtcagtagcagctccagttcgaccgcgacacgggggtgagaacattcctgactgctcccttctgggagaaaaagcactgggacatggcacgcggaggcacattgttaaaagatttgctagatcaaatctcgcaatgcgatacgactgcaatctcgaaggttttgcttttttggaattggctaatcacagctatttcaaagaaaatctggatattgtgacgactacatttgaaagagcagatgcggatgactttgatattttcggttttatacacaatgctaccagtgcttggtcagcaagtcttaacaagatgaaatctcggacgagctacggctgcaattacgccaagagtatcgaaggaagatacaggttgatgtgtctgtacatccgatgttggaatggttgttga

SEQ ID NO: 5 - DNA, 438 bp, Ancylostoma ceylanicum
atggttttttgtgtgcttccacacctactgtcagtagcagctccagttcgaccgcgacacgggggtgagaacattcctgactgctcccttctgggagaaaaagcactgggacatggcacgcggaggcacattgttaaaagatttgctagatcaaatctcgcaatgcgatacgactgcaatctcgaaggttttgcttttttggaattggctaatcacagctatttcaaagaaaatctggatattgtgacgactacatttgaaagagcagatgcggatgactttgatattttcggttttatacacaatgctaccagtgcttggtcagcaagtcttaacaagatgaaatctcggacgagctacggctgcaattacgccaagagtatcgaaggaagatacaggttgatgtgtctgtacatccgatgttggaatggttgttga

SEQ ID NO: 6 - DNA, 540 bp, Ancylostoma ceylanicum
atgagcgcgatcatagatgaaaatatgttccactctatcctttataaggggagcccgagagtgttgctctatccgcacactgcagtgatgttctacgcttacccacttctggtggttctcaacctcctttccatgaccagcgcagcgaaggcacccaaaaaagattggaggaactgtgcaagtttgtatcaagacgaatcttgtccagagcagataaggaagccactggaagcgaaacttcgtcaagcattaaaaaagcttttagagaaggaactggaatatgactgcattcttgattacgctgccggtgtacaatttcgtttcggagccatatgggccagtgattcggaccttctgactgctaatgaaacaatatacgaagaggatactaaaggtaaatttgatccagaaacgttcgcccagcgcgctgttgaagaatggaaagtggaccttggaaagatggacccgaaaaagtttggttgtaactacctacatcttaatggtacgaagaggaacacagctgtatgccttttcttgtga

SEQ ID NO: 7 - DNA, 348 bp, Ancylostoma ceylanicum
atgtcatctcttactggactaactgtctgcgtcttctgtcttatctcaatcatttattctgccggaggacagtcggttcctcctaaatgtgaggattggaaggatactgaaacacctttgcaccagggaatggccaaatatatcatggaagcttttaaagatctcaaacaagagcgtccgaaatactcatgtaaactggagaagatggctcataaacttatgccaaagccagagaaagacggagtattgggtaaatttttcgtcacgagatacgtaagcggcggagtcccttcttccaatgacgttgttcaatattggaagcttaagctgcgagcggtaagagcttaa

SEQ ID NO: 8 - DNA, 360 bp, Ancylostoma ceylanicum
atgattgatcttccgcaacgtgttgaaggggtctatacgtcggtcttctgtcttatctcaatcatttattctgccggaggacagtcggttcctcctaaatgtgaggattggaaggatactgaaacacctttgcaccagggaatggccaaatatatcatggaagcttttaaagatctcaaacaagagcgtccgaaatactcatgtaaactggagaagatggctcataaacttatgccaaagccagagaaagacggagtattgggtaaatttttcgtcacgagatacgtaagcggcggagtcccttcttccaatgacgttgttcaatattggaagcttaagctgcgagcggtaagagcttaa

SEQ ID NO: 9 - DNA, 435 bp, Ancylostoma ceylanicum
atgattgatcttccgcaacgtgttgaaggggtctatacgtcggtcttctgtcttatctcaatcatttattctgccggaggacagtcggttcctcctaaatgtgaggattggaaggatactgaaacacctttgcaccagggaatggccaaatatatcatggaagcttttaaagatctcaaacaagagcgtccgaaatactcatgtaaactggagaagatggctcataaacttatgccaaagccagagaaagacggagtattgggtaaatttttcgtcacgagatacgtaagcggcggagtcccttcttccaatgacgttgttcaatattggaagcttaagctgcgagcgatgggcaaagttgcaaggttcggttgcaactttgagaaaacagaacaaaagcacacaatcgtatgtgtttataggcgatctgaataa

SEQ ID NO: 10 - DNA, 255 bp, Ancylostoma ceylanicum
atgctctctgctggtatacttgcggcgttctgcctccttcccatgatcatgggatctgttcccacgtgtgatgatgatgaattagcgtatcccgatgaagggaatatcaaaaaccttgttttcaagaaaatttcggaaaaaatacaaggccaaccgtcatacgactgtgagctgcagagcaaagctcagatcaaatttgacctaattggtgaagatggtgatgacgctaagtctttcaaagtcgtcgacacgtaa

SEQ ID NO: 11 - DNA, 411 bp, Ancylostoma ceylanicum
atgctctctgctggtatacttgcggcgttctgcctccttcccatgatcatgggatctgttcccacgtgtgatgatgatgaattagcgtatcccgatgaagggaatatcaaaaaccttgttttcaagaaaatttcggaaaaaatacaaggccaaccgtcatacgactgtgagctgcagagcaaagctcagatcaaatttgacctaattggtgaagatggtgatgacgctaagtctttcaaagtcgtcgacacggttatggcaaacagcaaagaagacttcatcacagagactgctgagaagtggtctcagaagttgggatcgatgagctcaacaaagttcggatgcacttatgccgagcgagattacgaaggaaccccaaccaaccgcctacttggttgcgtttttgcctga

SEQ ID NO: 12 - DNA, 300 bp, Ancylostoma ceylanicum
atgtttccattcactgcttcacttgtactggttctcgttcttctccaatcgaagtggtcctcgggagacgaaagagtagatgatgaaactaactgcaaagacaaagcagaatatccatgcgaacgcaccgatattcgaaatcctctggttgaaggaataaaggaggtgaaaaaagagctgaaatacaattgcacactggaagaactcgccggttctgttaccttcaacaatactgacgaggactggattagagtgaccgtaaacatgaccaatgtgaatcatactttcttcaccctgtaa

SEQ ID NO: 13 - DNA, 393 bp, Ancylostoma ceylanicum
atgtttccattcactgcttcacttgtactggttctcgttcttctccaatcgaagtggtcctcgggagacgaaagagtagatgatgaaactaactgcaaagacaaagcagaatatccatgcgaacgcaccgatattcgaaatcctctggttgaaggaataaaggaggtgaaaaaagagctgaaatacaattgcacactggaagaactcgccggttctgttaccttcaacaatactgacgaggactggattagagtgaccgtaaacatgaccaatgtgaatcatactttcttcaccctgccgttcggatcctacaacaacgcaagcgattttgtcaaacaagctcttggaaattggtcgactccacaggaaaagaaaaaggtggggacagcttaa

SEQ ID NO: 14 - DNA, 423 bp, Ancylostoma ceylanicum
atgtcatctcttactggactaactgtctgcgtcttctgtcttatctcaatcatttattctgccggaggacagtcggttcctcctaaatgtgaggattggaaggatactgaaacacctttgcacctgggaatggccgaagatatcatggaagcttttaatgatctcagacaagagcgtccgaaatactcatgtaaactggagaagatggctcataaacttatgccaaagccagagaaagacggagtattgggtaaatttttcgtcacgagatacgtaagcggcggagtcccttcctccaatgacgttgttcaatattggaagctcaagctgcgggcgatgggcaaagttgcaaggttcggttgcaactttgagaaaacagaacaaaagcacacaatcgtatgtgtttataggcgatctgaataa

SEQ ID NO: 15 - DNA, 435 bp, Ancylostoma ceylanicum
atgattgatcttccgcaacgtgttgaaggggtctatacgtcggtcttctgtcttatctcaatcatttattctgccggaggacagtcggttcctcctaaatgtgaggattggaaggatactgaaacacctttgcacctgggaatggccgaagatatcatggaagcttttaatgatctcagacaagagcgtccgaaatactcatgtaaactggagaagatggctcataaacttatgccaaagccagagaaagacggagtattgggtaaatttttcgtcacgagatacgtaagcggcggagtcccttcctccaatgacgttgttcaatattggaagctcaagctgcgggcgatgggcaaagttgcaaggttcggttgcaactttgagaaaacagaacaaaagcacacaatcgtatgtgtttataggcgatctgaataa

SEQ ID NO: 16 - DNA, 618 bp, Ancylostoma ceylanicum
atgattcactcttcaacagcattcctctcaccttttggctccaaggacactgcggacgagtctgctgaggaggacccaacggatctcgttgatcctcttatcaaagaaaaggcagatgctgcggcaaaattgatccatgactctagaaatgctggaagaaacccttcagcgcctagaaaaccgcctccttcgaatgctgctctaactgaacaggaaattaaacttggcttgcctgactgctcaattttgggaaagttcagcttcaagcggaatctgcgaacgcgtgttgctaaagcgataaaaaacataaacaaaaggcaacagcggaaggaagtgaaatatgcttgcgaactcgaaggtcatacgggactagaaattgtagcaactttagccaacgaggagtacacaactccgccacacccgaggatcaagtcgttcatctacgaagcggaaaagaaagcaggttataaggcacaccatttcatcagagacgctattaagaaatggcgaaaggagctgagagctatggatccaaaagataagtatggctgcaactacggagcgagcaagactcattactttgttgtgtgttattttgatatacagcaagaggattag

SEQ ID NO: 17 - DNA, 450 bp, Ancylostoma ceylanicum
atgatatcaacgctgttcgcatcacttctggcgctccagttactcctccctgcccaggcccttcatctaccagcaccaggagccccttcagattcggtgactgtcccagattgcaaagacggcatgaagactaaagcaagagaggctcttgtcaaagcagtaaaggccaaagatccgaaattgacgtacgattgtgaactagcaaaacaggcgctacaggaagccagaggattgccccctaatagagctcctggaggatcttcagatggaactgacacgggcatgcattcctcactggggctcgcttttactaacgaaaggaccgatgactacaagccacgaaaattcgtgggagacgctgtggatagctgggacaacgatttaaagaaggtgaggaaaagtggcagttccttcaattttgatgaatcgattgaaaaacttcctctctga

SEQ ID NO: 18 - DNA, 456 bp, Ancylostoma ceylanicum
atgtacacacccactgagttggatttactgattttctactcgcttttactggtgggtcttgcaacaacaagattgtctcgtttcaactgtacggacatgacggaaggcgcactccagccatctcaacgagagcacctgtggcatcaagttaccataagcatgagactgtggatcggtccgcgctacaactgcaccctggaaaaaatggccgcaagcaaattaaacgaatcggttctccgattcccacgaggtaaaagtcgctctgcatcgaacgtgcaactttcgcatacaagtttcagaggtaagaaaatcgactacaaaggtgaaaaagactttttctacaaagcgtctcgatcttggctcactaatttagtaatgctgaaacacaaacaatacctgggctgcagcttggattcgactggtttggaatataggattatttgtctatataactga

SEQ ID NO: 19 - DNA, 597 bp, Ancylostoma ceylanicum
atggttcactggcacgtgacgtttgcaattttctacctcgttcaagtcgtattctcggaggcggtgccgagtgatccacctcagtgctcctacgagggaaaggcattcactgacaggaaccgaaagcgaatttttgacgcagtagttggagcgacagatggattgacattgggatacagctgcgatttggaggaggaagcgttacccctcttgaaaggaggtagtgtggatccaccactaatcatgctgagatatgagggtgatcgtacccgccaccacaatgcaggaagtttcttcaaggaagccgttcagtcttggtcagaaggtctcggtagggtgtacagttgtgctttggagggattcgcaggactcatcttggctgatcctcgtaaaccttgcactgacacttccgacatcatgcaacttccgtacgaaaggaaggtagaaccaggtgtccagaccgaaaatgtgatagaagaggctaagaaggcatggaaacaatatttttacagcctaaacagagtcgatcgcattggttgtaactacatcgtggaacacaacaaacacaagttcttgtgctttttcaagagaaattga

SEQ ID NO: 20 - DNA, 435 bp, Ancylostoma ceylanicum
atggctcagtgttacattcttcttactctcgcttcaattgccgctctgtcgacttgtcttcagctgagaccgcactgctctcagttgggtaaatacgcgatgccttccagcgaccagagaatggtcctctttactggagtggaagcgctcgctccaagcaaggacgttggcttgaaaattgtatacgaatgtgcccttgaaggaatgggtggactgatcctggagagcccagagaaaccgtacaactgtgctcaatcacttggaatcttcccgcttatttttgaaatagacgaaggtaccgatgtcaacgctgcgaacaacgctgctatcaaacattgggaaaatcacattcccaacctcagaggcagatcaggttttggatgcaactacatcaaggaacagggcaagcacagatacatttgtcttttcaagtga

SEQ ID NO: 21 - DNA, 672 bp, Ancylostoma ceylanicum
atggatccaatattacgtgtcacttactcttggctctcccttcaacttgccctttctggctcgccccgtctgagtatacagattttgcccgccaatactacagaaactccgcttgagctgagttcacaaagtccgctcgatgtgacttcacaaagtccgcgcgagctgacttcaccagggacagttgagccgccttcagaaggtccgcccgagctgagttcaccaagtccgcccgagatgagttcaccgagctcacctgagccgagttcaaaaagtccaatgcgccagagttcgaaccaggagagtccctgcacccagttgggcgtgtatgcaatgccttacgatcaaggaatggagctgcttttaggagtcgaagctcgcgcaccaaagggagaaatgggctctaaactggtgtacgaatgtgctcttgagggtatggccggactgattttgaagagccgtaggaaagcgttatgctgtcccaaaactcttggaatcttcccgctgatttttgagatgatggatggaccaggcaccaatgctacggagacaaaccaggccgttctcgaagcatgggacaaacacctgccaaaccttgggaagatatcaagcttcggatgcaactacattcaccaggaaggcaagcacagatttctgtgtcttttcaagtga

SEQ ID NO: 22 - DNA, 321 bp, Ancylostoma ceylanicum
atggagctgcttttaggagtcgaagctcgcgcaccaaagggagaaatgggctctaaactggtgtacgaatgtgctcttgagggtatggccggactgattttgaagagccgtaggaaagcgttatgctgtcccaaaactcttggaatcttcccgctgatttttgagatgatggatggaccaggcaccaatgctacggagacaaaccaggccgttctcgaagcatgggacaaacacctgccaaaccttgggaagatatcaagcttcggatgcaactacattcaccaggaaggcaagcacagatttctgtgtcttttcaagtga

SEQ ID NO: 23 - DNA, 366 bp, Ancylostoma ceylanicum
atggcgcagtactatgcaattcttacacttgcttctattctcgcactttcggggtgccttcagctgagaccggactgctctcagttgggccaatacgctatgccttccgacgaacacaggatggtcctgtttagcggggtcgaacatctcgcaccgaggaaggatgtcggcttgaaagtggtcagtttcgtaaaacaaaacaagcaagaacgtttgtttttcggtctagcagaattaagaacttacttcttgaaggtatacgaatgcgcccttgagggaatggctggactgatcttgcaaaaccctggaaagccacttacgtgtcctcaatctcttggaatctacccgctcattttcgagacgtaa

SEQ ID NO: 24 - DNA, 468 bp, Ancylostoma ceylanicum
atggcgcagtactatgcaattcttacacttgcttctattctcgcactttcggggtgccttcagctgagaccggactgctctcagttgggccaatacgctatgccttccgacgaacacaggatggtcctgtttagcggggtcgaacatctcgcaccgaggaaggatgtcggcttgaaagtggtcagtttcgtaaaacaaaacaagcaagaacgtttgtttttcggtctagcagaattaagaacttacttcttgaaggtatacgaatgcgcccttgagggaatggctggactgatcttgcaaaaccctggaaagccacttacgtgtcctcaatctcttggaatctacccgctcattttcgagacagacgacagccatgatgttaatgccgcgaacagaatggctctggaaacatggaaaaattacgttccctacgtaaggaaatgctttgatcttgcaatgtatatgtaa

SEQ ID NO: 25 - DNA, 393 bp, Ancylostoma ceylanicum
atggcgcagtactatgcaattcttacacttgcttctattctcgcactttcggggtgccttcagctgagaccggactgctctcagttgggccaatacgctatgccttccgacgaacacaggatggtcctgtttagcggggtcgaacatctcgcaccgaggaaggatgtcggcttgaaagtggtatacgaatgcgcccttgagggaatggctggactgatcttgcaaaaccctggaaagccacttacgtgtcctcaatctcttggaatctacccgctcattttcgagacagacgacagccatgatgttaatgccgcgaacagaatggctctggaaacatggaaaaattacgttccctacgtaaggaaatgctttgatcttgcaatgtatatgtaa

SEQ ID NO: 26 - DNA, 342 bp, Ancylostoma ceylanicum
atggctctttcggtgtgtcttcagctaagaccagattgctcccagttgggcaaatacgctctacatgatggcccgagaatgcagctttttgataaggtccaagctcatgcaccggttaaaaacgtgggcttgtcgttgctgtacgaatgcgctctggagggacttgctggattgatcctggaaaatcctcgtagaccgatgacctgtccatattccctcggatactatcctctaatttttcaactatatgtggaaggtgaagatggagcggacttgaactcggtaggctctcacacatgggagcagatccgtactgtgagcagttattcttattctagctga

SEQ ID NO: 27 - DNA, 381 bp, Ancylostoma ceylanicum
atggctcagtgctacacaatccttactctcgcgtcgctcatggctctttcggtgtgtcttcagctaagaccagattgctcccagttgggcaaatacgctctacatgatggcccgagaatgcagctttttgataaggtccaagctcatgcaccggttaaaaacgtgggcttgtcgttgctgtacgaatgcgctctggagggacttgctggattgatcctggaaaatcctcgtagaccgatgacctgtccatattccctcggatactatcctctaatttttcaactatatgtggaaggtgaagatggagcggacttgaactcggtaggctctcacacatgggagcagatccgtactgtgagcagttattcttattctagctga

SEQ ID NO: 28 - DNA, 414 bp, Ancylostoma ceylanicum
atggcccagtggcgcattcctttgactcttctatactgtgcagctatagtcatttctggacgcactcaacagaatcctaactgctcgcagctgaatagatacgcttcacccaacgatgtgagagagagcttcaatggagcgattctagcggaagtgtacgactgtgctctcgagggattgggaggactttacctagaggagaacagtggtactggaaactgtgacgttcctaccggagtgacgatactcacctacgaaactggagccaaccgtgacctcgagctcagcgtttatgtcgaggatgccattatagcctggacgagacactttcgatacctggcaacgagaagcatttttggatgcaaccacgtcttgcgctatgggaatcacaaaattgtctgccttttcaattga

SEQ ID NO: 29 - DNA, 441 bp, Ancylostoma ceylanicum
atgcgtggcccgacacccgacctaaagatggcccagtggcgcattcctttgactcttctatactgtgcagctatagtcatttctggacgcactcaacagaatcctaactgctcgcagctgaatagatacgcttcacccaacgatgtgagagagagcttcaatggagcgattctagcggaagtgtacgactgtgctctcgagggattgggaggactttacctagaggagaacagtggtactggaaactgtgacgttcctaccggagtgacgatactcacctacgaaactggagccaaccgtgacctcgagctcagcgtttatgtcgaggatgccattatagcctggacgagacactttcgatacctggcaacgagaagcatttttggatgcaaccacgtcttgcgctatgggaatcacaaaattgtctgccttttcaattga

SEQ ID NO: 30 - DNA, 444 bp, Ancylostoma ceylanicum
atggcccagtggcgcattcctttgactcttctatactgtgcagctatagtcatttctggacgcactcaacagaatcctaactgctcgcagctgaatagatacgcttcacccaacgatgtgagagagagcttcaatggagcgattctagcggaagtgagatccagggcgccacgaaaattgctggtgtacgactgtgctctcgagggattgggaggactttacctagaggagaacagtggtactggaaactgtgacgttcctaccggagtgacgatactcacctacgaaactggagccaaccgtgacctcgagctcagcgtttatgtcgaggatgccattatagcctggacgagacactttcgatacctggcaacgagaagcatttttggatgcaaccacgtcttgcgctatgggaatcacaaaattgtctgccttttcaattga

SEQ ID NO: 31 - DNA, 534 bp, Ancylostoma ceylanicum
atgtcagtaatagcgttttcaagcggtgtacccgcttgcactggattgggtcagtacactatgcaacgggatgtaaaggacgatgtagtacagaaagtaattctttactcaccaggcaaagatgtcgttagtatgagctcggtgagttttggggaatgtgcgctgcgagctggagctgcgcataaacagaaccatttcatgctactaacacatcccacagctattttatacgcagtaataggagaagcatgtgggtcgaagtctcaaattattaaggtgtacgattgctatctggaagaaatggctggtcggattttagaagatccttacaagtcactagacgaacccaaatctcttggaatgtatccactcgtttacgacattgatgaacaacctggcgtcaacgtaaggctcatgacgcacgcagctattgatacatggaagaaatacattcctcatgtgacatttggaacttttggatgcaattataggcacgagaatggggcacacaagtatctctgcattttcaattga

SEQ ID NO: 32 - DNA, 690 bp, Ancylostoma ceylanicum
atgaccgaacgaacgggggcaagtctcgcagatgttgtcatctatatcagcaacgccaaatcactgccatatctcctggttgcagtgacactccacagtgatgttgtctgcttatcttgttctagtggtgagcgcattcaatcaggccgcattcgtatctacttgttcaataacattgttttatttctgcagatcttctatgtccttcctatgataagagcgtctgggaaatctgctaataatacatgcgaggcgagcaaaatgttattgggtccttgccgaaaagtgatcaaattacccttgttggaagagatctcggaaaaaatgtcggacaaacaactgcaatacgattgcgaactggaagacgcggctcttggcaaactccttctggatgcagacgtcgctgatttttatctgaagcttttcccacaagcaaacggcactacgcaactacaattcaacgagaaggcaaatggagcatttgtgatggatattaggtttatttacaggactagaactgaaactactttaacccacaccgaagcaaacgatttcgttagcaaagcagttcagtcgtggtcgagcagattggaagagatgaaaaccaatacatcaaatgcggctaagtatggttgcaatttcgcagtggagaaaggattcagatatacgctcttgtgtcttttcagttga

SEQ ID NO: 33 - DNA, 645 bp, Ancylostoma ceylanicum
atgaccgaacgaacgggggcaagtctcgcagatgttgtcatctatatcagcaacgccaaatcactgccatatctcctggttgcagtgacactccacagtgatgttgtctgcttatcttgttctagtggtgagcgcattcaatcaggccgcattcgtatctacttgttcaataacattgttttatttctgcagatcttctatgtccttcctatgataagagcgtctgggaaatctgctaataatacatgcgaggcgagcaaaatgttattgggtccttgccgaaaagtgatcaaattacccttgttggaagagatctcggaaaaaatgtcggacaaacaactgcaatacgattgcgaactggaagacgcggctcttggcaaactccttctggatgcagacgtcgctgatttttatctgaagcttttcccacaagcaaacggcactacgcaactacaattcaacgagactagaactgaaactactttaacccacaccgaagcaaacgatttcgttagcaaagcagttcagtcgtggtcgagcagattggaagagatgaaaaccaatacatcaaatgcggctaagtatggttgcaatttcgcagtggagaaaggattcagatatacgctcttgtgtcttttcagttga

SEQ ID NO: 34 - DNA, 585 bp, Ancylostoma ceylanicum
atgaccgaacgaacgggggcaagtctcgcagatgttgtcatctatatcagcaacgccaaatcactgccatatctcctggttgcaggccgcattcgtatctacttgttcaataacattgttttatttctgcagatcttctatgtccttcctatgataagagcgtctgggaaatctgctaataatacatgcgaggcgagcaaaatgttattgggtccttgccgaaaagtgatcaaattacccttgttggaagagatctcggaaaaaatgtcggacaaacaactgcaatacgattgcgaactggaagacgcggctcttggcaaactccttctggatgcagacgtcgctgatttttatctgaagcttttcccacaagcaaacggcactacgcaactacaattcaacgagactagaactgaaactactttaacccacaccgaagcaaacgatttcgttagcaaagcagttcagtcgtggtcgagcagattggaagagatgaaaaccaatacatcaaatgcggctaagtatggttgcaatttcgcagtggagaaaggattcagatatacgctcttgtgtcttttcagttga

SEQ ID NO: 35 - DNA, 630 bp, Ancylostoma ceylanicum
atgaccgaacgaacgggggcaagtctcgcagatgttgtcatctatatcagcaacgccaaatcactgccatatctcctggttgcaggccgcattcgtatctacttgttcaataacattgttttatttctgcagatcttctatgtccttcctatgataagagcgtctgggaaatctgctaataatacatgcgaggcgagcaaaatgttattgggtccttgccgaaaagtgatcaaattacccttgttggaagagatctcggaaaaaatgtcggacaaacaactgcaatacgattgcgaactggaagacgcggctcttggcaaactccttctggatgcagacgtcgctgatttttatctgaagcttttcccacaagcaaacggcactacgcaactacaattcaacgagaaggcaaatggagcatttgtgatggatattaggtttatttacaggactagaactgaaactactttaacccacaccgaagcaaacgatttcgttagcaaagcagttcagtcgtggtcgagcagattggaagagatgaaaaccaatacatcaaatgcggctaagtatggttgcaatttcgcagtggagaaaggattcagatatacgctcttgtgtcttttcagttga

SEQ ID NO: 36 - DNA, 438 bp, Ancylostoma ceylanicum
atgacatctctcatcactctggttgcctgtggttgctatcttctggcaatcgctccatcaacagaagcggttgagacaacaactaagaagaattttgtggccatatgcaagaaggagttgggtgacaaagcgattaataacccacaagctcgcaagatgctgtttacagaagttcaaatcgccaagggacaatggaacaacctcatgaagtattcctgtgagctagaaaagcttgctagaaatcttgtgacagagcctccaggcattgttggaagcaaatacagagtcacatatgacgctggaaagggaaccctcaacctgaagagtagcgtcaaaaagtggaaggatcaactgcaaaagatggaaaagaaaacgaaagtcggctgcaatttttctaaggatgataagcaatacaaggtcgcctgcgtgtttgagtag

SEQ ID NO: 37 - DNA, 744 bp, Ancylostoma ceylanicum
atgagacaagttgccgagaaagacggttttgacatagatggagaagcactacaaatgccactctttgccgatgatgtggtgctagtagcaagtaaaccggagaccctgcaaagtcttctcaatgaaatgtgccacctcactgagagcatcgggttgaagatccaccctgggaaaacgaagtggatgaagaacgtccattgcgatgatttcgaaatcaaattgaacaaccagtttgtcgaggtttccactacgcataaaagcaccacgaattgtacacacagtgcattacatacttgccttcgagcaatgacatctctcatcactctggttgcctgtggttgctatcttctggcaatcgctccatcaacagaagcggttgagacaacaactaagaagaattttgtggccatatgcaagaaggagttgggtgacaaagcgattaataacccacaagctcgcaagatgctgtttacagaagttcaaatcgccaagggacaatggaacaacctcatgaagtattcctgtgagctagaaaagcttgctagaaatcttgtgacagagcctccaggcattgttggaagcaaatacagagtcacatatgacgctggaaagggaaccctcaacctgaagagtagcgtcaaaaagtggaaggatcaactgcaaaagatggaaaagaaaacgaaagtcggctgcaatttttctaaggatgataagcaatacaaggtcgcctgcgtgtttgagtag

SEQ ID NO: 38 - DNA, 444 bp, Ancylostoma ceylanicum
atgacatccctcatcactctggtggcctgtgccttctatcttctcgtgatcaccacttcggctgaagctgaagcggctgaggaagaatctaaaaagaaatttatggcagaatgcaatgagaagttaggcgacaaggcgattggtaacccacatgcacgcaagatgctgtttgcagaagttcaaatcgccaaagggcagtggaataacctcatggagtattcctgtgatctagaaaagcttgctagaaatcttgtgacagagcctctaggcattgtcggacctccttacaaagtcacttttgacgctggagatggaactctcaacctgaaggacagcgccaaaaagtggaaagatcaactgcaaaagatgggagagaaaaagaaagtcggctgcaatttttcgaagggtaagaagcgatacatggtcgcctgcgtgtttgagtga

SEQ ID NO: 39 - DNA, 513 bp, Ancylostoma ceylanicum
atgacatccctcatcactctggtggcctgtgccttctatcttctcgtgatcaccacttcggctgaagctgaagcggctgaggaagaatctaaaaagaaatttatggcagaatgcaatgagaagttaggcgacaaggcgattggtaacccacatgcacgcaagatgctgtttgcagaagttcaaatcgccaaagggcagtggaataacctcatggagtattcctgtgatctagaaaagcttgctagaaatcttgtgacagagcctctaggcattgtcggacctccttacaaagtcacttttgacgctggagatggaactctcaacctgaaggacagcgccaaaaagtggaaagatcaactgcaaaagatgggagagaaaaagaaagtcggctgcaatttttcgaaggccgtggactatccgctttgttcgttctgccttcgagatcctcttgctctttcagtgtcgtatttgagaaacgttgaagatgaagacgttcatttgattcgccgatag

SEQ ID NO: 40 - DNA, 426 bp, Ancylostoma ceylanicum
atgtcatcccttactagactgattgctattgcctgctgtcttctctcagttgtctcgtctgccagcgtatcaacgcctgatgtgccagactgtctgaaaacttcaaaaaagaactatatggcaattcccaaccatttgattcgtcagatgatgtttacggatgttgttgctgccaagggacagaatagcgacctgaagtacagttgcgaaatggaagagcttgcctatgatcttgtaaatgagtcaggtcctatagatcacgtcgaccccgacaatatcgtcttctcaatgggaaatggaaaactcaacttgaaaactgctgtcgacttgtggcaagaccggctgaaggagatgggtgaaaagaaagaattcggctgcaactttgctattggtagcacccacaaagtcgcctgcattttcaagtaa

SEQ ID NO: 41 - DNA, 570 bp, Ancylostoma ceylanicum
atgtcatcccttactagactgattgctattgcctgctgtcttctctcagttgtctcgtctgccagcgtatcaacgcctgatgtgccagactgtctgaaaacttcaaaaaagaactatatggcaattcccaaccatttgattcgtcagatgatgtttacggatgttgttgctgccaagggacagaatagcgacctgaagtacagttgcgaaatggaagagcttgcctatgatcttgtaaatgagtcaggtcctatagatcacgtcgaccccgacaatatcgtcttctcaatgggaaatggaaaactcaacttgaaaactgctgtcgacttgtggcaagaccggctgaaggagatgggtgaaaagaaagaattcggctgcaactttgctattggtagcacccacaaagtcgcctgcattttcaagtatgtaacagctaaccacttgacatctgcttatccagatctaggtacaccaccaacggcgcctttgagatattcacgtacaggctacgccactggactacgtaagtgtcccgaggcgagctttgtgtttcaagagcttcttatctaa

SEQ ID NO: 42 - DNA, 489 bp, Ancylostoma ceylanicum
atgtcatcccttactagactgattgctattgcctgctgtcttctctcagttgtctcgtctgccagcgtatcaacgcctgatgtgccagactgtctgaaaacttcaaaaaagaactatatggcaattcccaaccatttgattcgtcagatgatgtttacggatgttgttgctgccaagggacagaatagcgacctgaagtacagttgcgaaatggaagagcttgcctatgatcttgtaaatgagtcaggtcctatagatcacgtcgaccccgacaatatcgtcttctcaatgggaaatggaaaactcaacttgaaaactgctgtcgacttgtggcaagaccggctgaaggagatgggtgaaaagaaagaattcggctgcaactttgctattggtagcacccacaaagtcgcctgcattttcaaatctaggtacaccaccaacggcgcctttgagatattcacgtacaggctacgccactggactacgtaa

SEQ ID NO: 43 - DNA, 600 bp, Ancylostoma ceylanicum
atgtcatcccttactagactgattgctattgcctgctgtcttctctcagttgtctcgtctgccagcgtatcaacgcctgatgtgccagactgtctgaaaacttcaaaaaagaactatatggcaattcccaaccatttgattcgtcagatgatgtttacggatgttgttgctgccaagggacagaatagcgacctgaagtacagttgcgaaatggaagagcttgcctatgatcttgtaaatgagtcaggtcctatagatcacgtcgaccccgacaatatcgtcttctcaatgggaaatggaaaactcaacttgaaaactgctgtcgacttgtggcaagaccggctgaaggagatgggtgaaaagaaagaattcggctgcaactttgctattggtagcacccacaaagtcgcctgcattttcaagtatgtaacagctaaccacttgacatctgcttatccagatctaggtacaccaccaacggcgcctttgagatattcacgtacaggctacgccactggactacataccagtttgaagcgcatgatctcgcaaacatttctgaatgtgaagctcattttctgccttgttttggaaatataa

SEQ ID NO: 44 - DNA, 561 bp, Ancylostoma ceylanicum
atggaagcaaattggaggaacgcggaagccagctgcgcgagaatatgcaataccagtgaactatttattaagctgcagcttgtacagggattaccactgcgcatcaatctgcacagaaggagatcgcaactcacaaacacatcagtaatgtctccttctaccctcctgattgtctgcgtcttctatcttttcgcaatcgcttgctatgctgaagaatcagcattggaaaagctcgataagctgattcctcaatgtcgggagttgggcagcaaagcgtttgctaagtccgttaagaagctgttgtatattgatgtactcaatagcaagagacaagatcatggcccgacgtacacctgcgatttggaaaagctcgcttatgagcttgtggaaaccacagacacagagcctgtttcccatcttggaaaagaagtcatattagaccagggagaaaacctcaacctgaataaattgaggaacgagtggggagagaaattaaaagtgatggagaacaaagagagattcggatgcaatctcaatctcaatcacaaaacgaaaaaatag

SEQ ID NO: 45 - DNA, 315 bp, Ancylostoma ceylanicum
atggctccaaaaattcgtttcgagctggctggaaaagttattgctgcaaaacaacaatatccccaggaaccggtgtatgattgcggggtggaaaaagaagcttatcagttcgtgagaccctctggacaaggaccttcccctatgattggatcgaatgtcgtatacaaacaggaaaatggcaaaacattcaacgtggacgaggttgttagagagtggaaggtaccactgcaagagatggggaataacaaaaagcgctttggatgcaatctctcgattgttcctggtcagtacaaggtcgcttgtgttttcgagtag

SEQ ID NO: 46 - DNA, 234 bp, Ancylostoma ceylanicum
atggatactccgacacccggctctcctttcttcttgactttgactagcggcaattgtgatctaggctatattacagccacttatcttctctcaatcgtttactcagcacccgaatgtaacagcaaaggaatgactagtaagcttcgtaacatgctggaaaaagatgtccagggacaatttcctaaactagcaagtttcttttcaatcacttatttcttacccgtagccaactaa

SEQ ID NO: 47 - DNA, 219 bp, Ancylostoma ceylanicum
atggaacacatcgcccaagaagctgtaaaatccataggccagggacagagcgaccagaccggcaagaccgtggtctacgagggagaaaaaaacaagatcaacctgaaagaagctgttgaaatttggaaatctaagctcggagacataaacaacaaaagtaaattcggatgcattgtgaagagtggagagaatttcaaactcgcttgtgccttcgactag

SEQ ID NO: 48 - DNA, 309 bp, Ancylostoma ceylanicum
atggatactccgacacccggctctcctttcttcttgactttgactagcggcaattgtgatctaggctatattacaaagtacgactgcggtatggaacacatcgcccaagaagctgtaaaatccataggccagggacagagcgaccagaccggcaagaccgtggtctacgagggagaaaaaaacaagatcaacctgaaagaagctgttgaaatttggaaatctaagctcggagacataaacaacaaaagtaaattcggatgcattgtgaagagtggagagaatttcaaactcgcttgtgccttcgactag

SEQ ID NO: 49 - DNA, 573 bp, Ancylostoma ceylanicum
atgatgcatgagaacacaaacacctcaacatccgctctgagcaatgacatctctcactttgctgatagcttgcgtatgtttcttctatgcattattttcaaaaatattccagcgcctactagaattctaacgacgtcctccagaattttccatgcaattcatgccatttatcttctccctaccgcttactcagagatcgaatgtccgcccggagcgattactccgaaacttcgtcaggtactgactaaggatatcaaggatgccaagagtcaggatctgaactacgagtgcgatatggaacaaaaagctcatgatgttgtaaaagggaaagaaagccggaccgaaagcaatgtcgtgtactccgcaggagaacagccgctcaacctgagaaacgttgttgactcgtggaaatctaaactgggagaggtgagagcgcaattttgtctaacgtatcagcgcttagtggtgctgctcaatttgttgaattaccgatttcagatgggtgaaaaaacgaaattcggatgcagtttgaagcttggtaaaagttacagggtcgcttgtgttttcgcatag

SEQ ID NO: 50 - DNA, 582 bp, Ancylostoma ceylanicum
atgatgcatgagaacacaaacacctcaacatccgctctgagcaatgacatctctcactttgctgatagcttgcgtatgtttcttctatgcattattttcaaaaatattccagcgcctactagaattctaacgacgtcctccagaattttccatgcaattcatgtttgcttagccatttatcttctccctaccgcttactcagagatcgaatgtccgcccggagcgattactccgaaacttcgtcaggtactgactaaggatatcaaggatgccaagagtcaggatctgaactacgagtgcgatatggaacaaaaagctcatgatgttgtaaaagggaaagaaagccggaccgaaagcaatgtcgtgtactccgcaggagaacagccgctcaacctgagaaacgttgttgactcgtggaaatctaaactgggagaggtgagagcgcaattttgtctaacgtatcagcgcttagtggtgctgctcaatttgttgaattaccgatttcagatgggtgaaaaaacgaaattcggatgcagtttgaagcttggtaaaagttacagggtcgcttgtgttttcgcatag

SEQ ID NO: 51 - DNA, 570 bp, Ancylostoma ceylanicum
atgcatgagaacacaaacacctcaacatccgctctgagcaatgacatctctcactttgctgatagcttgcgtatgtttcttctatgcattattttcaaaaatattccagcgcctactagaattctaacgacgtcctccagaattttccatgcaattcatgccatttatcttctccctaccgcttactcagagatcgaatgtccgcccggagcgattactccgaaacttcgtcaggtactgactaaggatatcaaggatgccaagagtcaggatctgaactacgagtgcgatatggaacaaaaagctcatgatgttgtaaaagggaaagaaagccggaccgaaagcaatgtcgtgtactccgcaggagaacagccgctcaacctgagaaacgttgttgactcgtggaaatctaaactgggagaggtgagagcgcaattttgtctaacgtatcagcgcttagtggtgctgctcaatttgttgaattaccgatttcagatgggtgaaaaaacgaaattcggatgcagtttgaagcttggtaaaagttacagggtcgcttgtgttttcgcatag

SEQ ID NO: 52 - DNA, 579 bp, Ancylostoma ceylanicum
atgcatgagaacacaaacacctcaacatccgctctgagcaatgacatctctcactttgctgatagcttgcgtatgtttcttctatgcattattttcaaaaatattccagcgcctactagaattctaacgacgtcctccagaattttccatgcaattcatgtttgcttagccatttatcttctccctaccgcttactcagagatcgaatgtccgcccggagcgattactccgaaacttcgtcaggtactgactaaggatatcaaggatgccaagagtcaggatctgaactacgagtgcgatatggaacaaaaagctcatgatgttgtaaaagggaaagaaagccggaccgaaagcaatgtcgtgtactccgcaggagaacagccgctcaacctgagaaacgttgttgactcgtggaaatctaaactgggagaggtgagagcgcaattttgtctaacgtatcagcgcttagtggtgctgctcaatttgttgaattaccgatttcagatgggtgaaaaaacgaaattcggatgcagtttgaagcttggtaaaagttacagggtcgcttgtgttttcgcatag

SEQ ID NO: 53 - DNA, 363 bp, Ancylostoma ceylanicum
atgtcacctctcaccgtgctgatagtttgcgtcatctatctcctccctacctcttactcagagaccgaatgtaagggtggaccaattactaaacgccttcgagaaatgctggaaaaagaagtccagcgaaaatttcctaccctaacgtacaactgcgagatggaaaagcgcgctgatgaagctgcaaattccacgggtaaagagcagagcgagcagacgatcatggactacaagcaaagaggcaacttgaacatgaaaaaagctattaagtcgtgggataaggaaaagataggtgacaaaacaaaatttggatgcactttgaagggtggcgaagaatacaagatcgtttgtgccttcgagtag

SEQ ID NO: 54 - DNA, 378 bp, Ancylostoma ceylanicum
atgcgtctctcgtcgtatttctgcttcgccggtgctatcttcaaggtcatctatctcctccctacctcttactcagagaccgaatgtaagggtggaccaattactaaacgccttcgagaaatgctggaaaaagaagtccagcgaaaatttcctaccctaacgtacaactgcgagatggaaaagcgcgctgatgaagctgcaaattccacgggtaaagagcagagcgagcagacgatcatggactacaagcaaagaggcaacttgaacatgaaaaaagctattaagtcgtgggataaggaaaagataggtgacaaaacaaaatttggatgcactttgaagggtggcgaagaatacaagatcgtttgtgccttcgagtag

SEQ ID NO: 55 - DNA, 435 bp, Ancylostoma ceylanicum
atgcagacgtccaggggatcactcgaggaaccacctaattgcgaggagcaagagccgatgggaccatcctgtccaaagcccatcagaaaactattgttcgagaaaatttcgaagaaattgtcctacatcggaccgaaatacgattgcggtctggaagatggagcagctggaaaactcattctcgacgatgcatatccttcatttttcctcgacctggaatacagaaaagatctgcgattttctaggataaggcagagaccaagtcaaactgtattcaacgtaaccgatttcattaatagggcccttgcaaaatggtcaaaggaatttgctgaggtaagagccaggatgatgaacaagttcggctgtaactacattattggtgacatggaagatgcaaattattacaaccactcactatgttgtctcttcaattga

SEQ ID NO: 56 - DNA, 582 bp, Ancylostoma ceylanicum
atgaagttgttcactactatacttattgtggtgagcgctttcagcccggttacagctttggggttcaatattcgattgtcttacaacaccgatttgtgtctccttgagagaagcgcgttttcgcaggtattgtacctcattccattgatgcagacgtccaggggatcactcgaggaaccacctaattgcgaggagcaagagccgatgggaccatcctgtccaaagcccatcagaaaactattgttcgagaaaatttcgaagaaattgtcctacatcggaccgaaatacgattgcggtctggaagatggagcagctggaaaactcattctcgacgatgcatatccttcatttttcctcgacctggaatacagaaaagatctgcgattttctaggataaggcagagaccaagtcaaactgtattcaacgtaaccgatttcattaatagggcccttgcaaaatggtcaaaggaatttgctgaggtaagagccaggatgatgaacaagttcggctgtaactacattattggtgacatggaagatgcaaattattacaaccactcactatgttgtctcttcaattga

SEQ ID NO: 57 - DNA, 486 bp, Ancylostoma ceylanicum
atgaagttgttcactactatacttattgtggtattgtacctcattccattgatgcagacgtccaggggatcactcgaggaaccacctaattgcgaggagcaagagccgatgggaccatcctgtccaaagcccatcagaaaactattgttcgagaaaatttcgaagaaattgtcctacatcggaccgaaatacgattgcggtctggaagatggagcagctggaaaactcattctcgacgatgcatatccttcatttttcctcgacctggaatacagaaaagatctgcgattttctaggataaggcagagaccaagtcaaactgtattcaacgtaaccgatttcattaatagggcccttgcaaaatggtcaaaggaatttgctgaggtaagagccaggatgatgaacaagttcggctgtaactacattattggtgacatggaagatgcaaattattacaaccactcactatgttgtctcttcaattga

SEQ ID NO: 58 - DNA, 465 bp, Ancylostoma ceylanicum
atgatagcttggtggtacgcatttattcttcttgtgtcaatagtatctctttcgagaagcatcgtgaagatacccgactgctctcagctgcggccatacaacatgcgccctgatatgagagatgatttagcaggaaaagtccttattcgtgcacctaatagaggagtgagcgcgtcgatggcgtatctatgcgctttggaagggatggccggactaattttggagaaactggagaaaccattaacatgtcccaattctcttggaatgtattcgcttatttttgagctcacgaacataacgcgatttagtgacgcctctgctgacgtggactttacagaaaaattgacaagtgcagctatcgaacattggaaagaacacatccctcgggtaacatttgccacatcattcgggtgcaattatagaaaggagcatggaaagcacaaatttttgtgtctgttaaaataa

SEQ ID NO: 59 - DNA, 417 bp, Ancylostoma ceylanicum
atgtctgctcctaccgtcctatttgcatgtgtcctttgctttctctcagccacttgctctgctgaaacagcggtggaatgggtggacaggctgacgacgcaatgttggaacactctaggcgagaaagcgcttagtagtagaaacgttaaaaggctgctgtttgttgatgtactacttaccaagcatatgtcaatgcagtatacctgcgatttggaagagaaaacctatgatctgctacagaaaataagtaaggagaatgtcccagagaacgtcgtatactccgaaggtacaaaactccacctacataacgttgtggagggatggaaagaccgactgattaagatgcccaaaaagaaattcggatgcaatatgttgtacaagatcaacagttataaaattgcttgtatgttcgagtaa

SEQ ID NO: 60 - DNA, 402 bp, Ancylostoma ceylanicum
atgaaaacgccaacacatggtcaggccgtctatcttctctcaataacttgctttgctgacgcatcgaagcatgcattgccggactgtcaaaccatcataacgatggggaaacacttgcgaggcattctctatgatgaagttgttgctgcaataaaaaaagataacatggaatacgactgcaaactggagaagatcgccttccaacttgcaaggaatgggatcagtagtatgcccgaaagaaatgccgtgtacggcgagagcccaaggagtgagcgcctgaacttgaaaagtattgttcaagggtggaaatatgaactacagctgatggtcgaagaaacgaaattcggctgcattgttttagatggtaaaaaacatttcaaggtcgcttgtgtttttgagtag

SEQ ID NO: 61 - DNA, 408 bp, Ancylostoma ceylanicum
atgtcatcttataccgccctgctcgcctgtgccgtctatcttctctcaataacttgctttgctgacgcatcgaagcatgcattgccggactgtcaaaccatcataacgatggggaaacacttgcgaggcattctctatgatgaagttgttgctgcaataaaaaaagataacatggaatacgactgcaaactggagaagatcgccttccaacttgcaaggaatgggatcagtagtatgcccgaaagaaatgccgtgtacggcgagagcccaaggagtgagcgcctgaacttgaaaagtattgttcaagggtggaaatatgaactacagctgatggtcgaagaaacgaaattcggctgcattgttttagatggtaaaaaacatttcaaggtcgcttgtgtttttgagtag

SEQ ID NO: 62 - DNA, 444 bp, Ancylostoma ceylanicum
atgaaaacgccaacacatggtcaggtgattcgaactatgtcatcttataccgccctgctcgcctgtgccgtctatcttctctcaataacttgctttgctgacgcatcgaagcatgcattgccggactgtcaaaccatcataacgatggggaaacacttgcgaggcattctctatgatgaagttgttgctgcaataaaaaaagataacatggaatacgactgcaaactggagaagatcgccttccaacttgcaaggaatgggatcagtagtatgcccgaaagaaatgccgtgtacggcgagagcccaaggagtgagcgcctgaacttgaaaagtattgttcaagggtggaaatatgaactacagctgatggtcgaagaaacgaaattcggctgcattgttttagatggtaaaaaacatttcaaggtcgcttgtgtttttgagtag

SEQ ID NO: 63 - DNA, 384 bp, Ancylostoma ceylanicum
atgaaggccgtctatcttctctcaataacttgctttgctgacgcatcgaagcatgcattgccggactgtcaaaccatcataacgatggggaaacacttgcgaggcattctctatgatgaagttgttgctgcaataaaaaaagataacatggaatacgactgcaaactggagaagatcgccttccaacttgcaaggaatgggatcagtagtatgcccgaaagaaatgccgtgtacggcgagagcccaaggagtgagcgcctgaacttgaaaagtattgttcaagggtggaaatatgaactacagctgatggtcgaagaaacgaaattcggctgcattgttttagatggtaaaaaacatttcaaggtcgcttgtgtttttgagtag

SEQ ID NO: 64 - DNA, 282 bp, Ancylostoma ceylanicum
atggttcgaacattctcctatttttccggcttcattgcctgctggtacgactgcaagttagaggaacttgctcgtgatcttgcaaaaggggagaaagatagcatacccggaattgaaactttctactccgagggcgaaaggaacacattgaacttgaggacgattgtgagcgaggagtggaaaggtcatctgcaggggattgccaacagacagaactttggctgcagtttgttgttcggaaaaactcgggaccgttacaaggtcgtttgtgtttttgtgtag

SEQ ID NO: 65 - DNA, 306 bp, Ancylostoma ceylanicum
atggaaacgcaaatacatcaccaaatggttcgaacattctcctatttttccggcttcattgcctgctggtacgactgcaagttagaggaacttgctcgtgatcttgcaaaaggggagaaagatagcatacccggaattgaaactttctactccgagggcgaaaggaacacattgaacttgaggacgattgtgagcgaggagtggaaaggtcatctgcaggggattgccaacagacagaactttggctgcagtttgttgttcggaaaaactcgggaccgttacaaggtcgtttgtgtttttgtgtag

SEQ ID NO: 66 - DNA, 243 bp, Ancylostoma ceylanicum
atgggtgatgagtacgactgcgagctggaagagattgcctatcaacttgcgagagatgggatttttagtatgcccgaaagaaatgctgtgtacggcgagagcacaacgaaagagagcttgagcttgaagaacattatccaggggtggaaacatcggttacagctgatgagcaatgagaagaaattcggctgcattgtgttgaagggtccaaaacttttcaaggtcgtttgtgtttttgagtag

SEQ ID NO: 67 - DNA, 465 bp, Ancylostoma ceylanicum
atgacattccgttttggtgtcgttctgctggttctctgctctccttccctgacatcatcatgggatttcgacaattttccgaaaggttgtgttggtgcgttgatcggctgcgactggcttgcgagatacggtatggctccagcggcaatccgaagtccgatggctggtcaaatttttttgcaccacccgaagtgtaagaagctgtcgtactcatgtgaattggaagcctacgctaccggcgctgcagtaatagatgatgggaaaactttcataaatgaaacctttccactacgaaactactattatttggaatatgaaggcaaagatccatacgatttattcgaagaagcagcaagaaagtgggcagatgatttcaagaagatgaggcgcaaagatattttcggatgctctggctacctgaacgggacagacaacaaagttgtttgcatctttgggaaggcgtag

SEQ ID NO: 68 - DNA, 468 bp, Ancylostoma ceylanicum
atgccgagctggttcctcctacttatcattgaggttctctgctctccttccctgacatcatcatgggatttcgacaattttccgaaaggttgtgttggtgcgttgatcggctgcgactggcttgcgagatacggtatggctccagcggcaatccgaagtccgatggctggtcaaatttttttgcaccacccgaagtgtaagaagctgtcgtactcatgtgaattggaagcctacgctaccggcgctgcagtaatagatgatgggaaaactttcataaatgaaacctttccactacgaaactactattatttggaatatgaaggcaaagatccatacgatttattcgaagaagcagcaagaaagtgggcagatgatttcaagaagatgaggcgcaaagatattttcggatgctctggctacctgaacgggacagacaacaaagttgtttgcatctttgggaaggcgtag

SEQ ID NO: 69 - DNA, 216 bp, Ancylostoma ceylanicum
atggctctcttcagcagcctggtttttgtggcattttgcctccttcacattgcatctcctgcacagctgagaggtgaagttcctaagtgcgaacgcttgggggcggatgcgcttagaatggaagaacgcggtaccttggtcgtccaactcaatgaagcaatgaaaaatgtcgagttgacggttagttctggatcgtgcggttgcagtatcggctaa

SEQ ID NO: 70 - DNA, 237 bp, Ancylostoma ceylanicum
atggagagcactgccaaattctctgttcacatacctaattacgaacgatggcctcattcgcaagaactcagacacgaagaacctagctcttccggttacggcccgttagtccaaaacgccataaaggaatgggcaccggagctcgagaaaatgaccggttcgcgatcatttggctgtaactacgagacggtgcacggaaaaatcacgcttgtttgtcttgttgtaagagctaaatga

SEQ ID NO: 71 - DNA, 432 bp, Ancylostoma ceylanicum
atggctctcttcagcagcctggtttttgtggcattttgcctccttcacattgcatctcctgcacagctgagaggtgaagttcctaagtgcgaacgcttgggggcggatgcgcttagaatggaagaacgcggtaccttggtcgtccaactcaatgaagcaatgaaaaatgtcgagttgacggaatattcctgccctatggagagcactgccaaattctctgttcacatacctaattacgaacgatggcctcattcgcaagaactcagacacgaagaacctagctcttccggttacggcccgttagtccaaaacgccataaaggaatgggcaccggagctcgagaaaatgaccggttcgcgatcatttggctgtaactacgagacggtgcacggaaaaatcacgcttgtttgtcttgttgtaagagctaaatga

SEQ ID NO: 72 - DNA, 477 bp, Ancylostoma ceylanicum
atggctctcttcagcagcctggtttttgtggcattttgcctccttcacattgcatctcctgcacagctgagaggtgaagttcctaagtgcgaacgcttgggggcggatgcgcttagaatggaagaacgcggtaccttggtcgtccaactcaatgaagcaatgaaaaatgtcgagttgacggaatattcctgccctatggagagcactgccaaattctctgttcacatacctaattacgaacgatggcctcattcgcaagaactcagacacgaagaacctagctcttccggttacggcccgttagtccaaaacgccataaaggaatgggcaccggagctcgagaaaatgaccggttcgcgatcatttggctgtaactacgagacggtgcacggaaaaatcacgcttgtttgtcttgtttcgaggaagaaaagaaagaagagactttacgtcttcatggattcatctattttaaaataa

SEQ ID NO: 73 - DNA, 564 bp, Ancylostoma ceylanicum
atgttttacagtttgctttcagtcgccgcgatcgttctcctcctgggagtgttcccgacgaacaccgatgccttgcaggcgttcccctattgcaaggagttgggcaaatacagaacacgcgacaacatcaaaaagcttctcataggagaagtctccactgcagagccactccgtggacacctcatcagtgttaccataatatacgactgcgtcctcgaaggattagccgtactggaaatgaaaagaagaggacccgccaacgtgtgcaccgatgctggagcattctttactgagaaatttgaagagcaatgcgctccatgtgtgaccagcaaaggagggcatggaactccgttgtcgcgccttagctccgcccacatgctcctcaaaatctgggctagaaaaagtgcaaagcgtgctggatacaaacccaagcagttcatagagaaggctgtcaaatcgttttaccccacaattggaaaactgggtgtaatgggaaaatatggctgcagctatgccacagatgaaaccaagtacaagcttgcatgtgtgttcatgaaaccctga

SEQ ID NO: 74 - DNA, 474 bp, Ancylostoma ceylanicum
atgtcctcacactcgtactcagttgtcgcgatcgttctccttctgggaatcttcacgacgagtaccgacgcgctagcgatattaccggattgcaaggcgctgggaaagtacgctgtgcgtgctaacatcagggagctcatattcgtgaacgtaatcactgctgagccaatccagaaccaacccgtcagtatcatgccgggttacgactgcatcctggagggcatagcccgcatcgagctggaccgaagcacgccgtcgaatctgtgcaccggggtgggaaaagtcatcacggagaaattcgaggatgccaagatacctggatacaaacccaaggatttcatagctaaagcagtaaaatcgttctacgactcaatcggaaagatgggcgtaactggacagttcggatgcaactatgctgctgatgagaccaagtacaggatcgcttgtgtcttccaaggaagattgcgccagtga

SEQ ID NO: 75 - DNA, 540 bp, Ancylostoma ceylanicum
atgtttctcttcgccgcctctgttgtcctggcattgtctcttctccaactaactgctggggacgcaccggactgcaccaaacaaagcaatgaacaatacccttgcgcgaaagaactaagagaactcttattcaaagagattccggagaaaatgggacgaaatctgacgtacaactgtacactggaagacctagccagtgtacttacttacttcagagacttcgaacgtacttcagagaaggattggcttcgactaacttcgggtatggatgaagtgaactatactatttatacagagcagacagaagaatatgaaagcttctcatcatcctcctgggatgaaccgacatataacgcaacgctgcttgtcgataaggctctcgaggcatggtcaataaaactaagactgatgccaaacagaacggacttcggctgtaacttcgacaatgatatcgtcaacacgattgcttgcgtatacactggaaagaatataacatttggagatcctaattcagctggtctgcctgatatcactttttag

SEQ ID NO: 76 - DNA, 483 bp, Ancylostoma ceylanicum
atgattcgctccactgctttggttgtgctggcactcattcttcttcaaacaactaccttttcgaatggagaagaagaatttaaaaaatgcacaggactgatggaaggagtcgacggagatggttgcccggaacaagttcgacaacctttgtacaataaattgaaagggaaaaacgataaattgaaccaaaactgcacgctggaaggagtaacagtaatatcgaataatttcaataacgaaattgcatatcgtggcgagttcggggaaatagatggcttgatacatctttggtacagagagaacaacaacaatgagctcacttttgggaaagacgaccctttaaagggcctcgacataccaggtttcatcgaaaaggttatcaaaaattgggataatgaattggacaaggtgaaacagaaaacgcagttcggctgttaccttggtgttagtttcaactacacgctcgtctgcgccttcgcctaa

SEQ ID NO: 77 - DNA, 450 bp, Ancylostoma ceylanicum
atgatttctttgcttctgttcgctctccaggtgttctccactacttctgtacaaggcatagccgcaaatgagtatcctccagagtgtgaatgttggggaagcatgttttgtattactaaggaaagtcggaagtatctaacacagaaagttgaagagatcatgagtccgcatggtaaaaaaccggtttacgtgtgttatatggaaagtgaatctcaatgggagttgctgagccccggatatatcaatgaatacggagaagactacgtaaaactctacaagcaaaagagcttcaatcgtcaaccaaagcaaccagagataaaaacctttttggaggaagctatcgaagaatggaaaagtaatatcacgaagatagaagacaaaaaacacttcggatgtcaagttacccctgatgtaaaaggcgtcagagctgtctgcctcttcacatattag

SEQ ID NO: 78 - DNA, 414 bp, Ancylostoma ceylanicum
atggctcctcttaccggcctggttgcctgcgctatctatcttctgtcagttgctcacaatgcaggatcgatccaggttctacccgagtgcaagggtaacaaagcaattgctgagaacgttcgtagactgctggctgtagaggttattgttgccaagcggcaactgccggagccgggatacaagtgcgatctggaatttcgtgcacaccagtatgtgaatacaaatcctggagggccagaacccatgtttggagacaatgtcgtttactccgaaggaaatgatgagaaatttaacgtggaaaaagttgttggcgagtggaaagatggactggaaaagatgggtgacaaaagcaaattcggatgcaatttgtcgatcgatgacaatcgttacaaggtcgcttgtgtcttcgagtag

SEQ ID NO: 79 - DNA, 231 bp, Ancylostoma ceylanicum
atgtcgaagaatcgcaaactggtggatgttttcctccataaagtcccaaactcggagaacctcgcacttttccttcagaaggggaaacaagactacaacaaggctcgagatttcgtcttaggggctgtcgagaactggggagatcaactagaacagatgaagtcaaaaacgcaatttgtttgcacactcgagacgagtcaaaattattacctcatttgcttcttcgagtag

SEQ ID NO: 80 - DNA, 309 bp, Ancylostoma ceylanicum
atgtcgaagaatcgcaaactggtggatgttttcctccataaagtcccaaactcggagaacctcgcacttttccttcagaagtacgcttgtcatctcactgaagagccctcattctctggtgcatatctccaggatgtaaattatcttgcctatcagggggggaaacaagactacaacaaggctcgagatttcgtcttaggggctgtcgagaactggggagatcaactagaacagatgaagtcaaaaacgcaatttgtttgcacactcgagacgagtcaaaattattacctcatttgcttcttcgagtag

SEQ ID NO: 81 - DNA, 393 bp, Ancylostoma ceylanicum
atgatttcagtcttgcttctgcaacttgtgacgttctatctcattcacctaactcaagctggtccattggcggcaccagatgtccaaatccccaattgcaatgacggcatgcaccccagagcaagggaacttcttgttaaaggagtaatgtcgaagaatcccaaactgaagtacgcctgtcatctcagtgaaggcttcgcattctctgatgcataccccccaaattatctttactacgacgggcggaaacacgactacagcaaggctcgagatttcgtcttaggggctgtcgaggagtgggaagctactctaagagagatgaagtcgagggagcgatttgtttgtaccttatcgacgaataagaagtatctcctcgtttgcgtattcgagtag

SEQ ID NO: 82 - DNA, 444 bp, Ancylostoma ceylanicum
atgaattcagttttgctcctgcaaattttgaccttctacctcattcacctgactccactgtcggcaacaggatctgctttgaaaggtgaggaaacggacacttctgaaagacgcagaggtcaagcttctccagatggccaaaggccaatcccggtgtgcgatgacggcatgaagcctaaagcgagggaacatcttgttaatgaaataacatcattcattcccaatatagagtacgcttgcaatctcactgaccagacttcattagaagctgaaatatcttctggtggatttgcccatgacggacctgtgcttttgttcggaaagcccagacgatccaaatatagggcacgagatttcgtcgatgatgctgtcaaggaatgggaatatgatctgactgaggtaaccaatagaaatgcccctcattgtcggccgaattgctgttga

SEQ ID NO: 83 - DNA, 477 bp, Ancylostoma ceylanicum
atgaattcagttttgctcctgcaaattttgaccttctacctcattcacctgactccactgtcggcaacaggatctgctttgaaaggtgaggaaacggacacttctgaaagacgcagaggtcaagcttctccagatggccaaaggccaatcccggtgtgcgatgacggcatgaagcctaaagcgagggaacatcttgttaatgaaataacatcattcattcccaatatagagtacgcttgcaatctcactgaccagacttcattagaagctgaaatatcttctggtggatttgcccatgacggacctgtgcttttgttcggaaagcccagacgatccaaatatagggcacgagatttcgtcgatgatgctgtcaaggaatgggaatatgatctgactgagatggagtcaagagagcgatttgtttgcgacctcgatacgacgaaggatgattatgccatcgtttgcttattcgagtag

SEQ ID NO: 84 - DNA, 432 bp, Ancylostoma ceylanicum
atgggtttctttagcggcttgatttttgcggcactctgcctccttcacgttacatcttctgcagtgatgaatgatgaagttcccgagtgtgaagaactcaagcggaaggcgcttagaatggaacaacgggatactttggtcgtccgacttaatgaagcgttgaagaatgtcgacgttacgaaatactcctgccctctcgagagaattgcccagtcccgtaagcacaaacctggccgcaaattatggcctgatgcgaaagtattcacacacgaagaggcaagttctaccgattacggcctattagtccgaaacgccatacaggagtggtcctcagatcttgagcagattagcggttcgaaagcttttggctgtaattacaggcaggaaaacgacaaaaccaaacttgtttgcattgttgcttccgaacagtga

SEQ ID NO: 85 - DNA, 606 bp, Ancylostoma ceylanicum
atgactgctttcatttcctatattgtttccacagcgtgttacacatacaactatcagatttgtaattttgttcagtatatttgtcatcattctctctgttcatgccctaacattccttcacaaaataacccgagtgtcttatatgccggagcagatccactgtgccacgccaccatgggtttctttagcggcttgatttttgcggcactctgcctccttcacgttacatcttctgcagtgatgaatgatgaagttcccgagtgtgaagaactcaagcggaaggcgcttagaatggaacaacgggatactttggtcgtccgacttaatgaagcgttgaagaatgtcgacgttacgaaatactcctgccctctcgagagaattgcccagtcccgtaagcacaaacctggccgcaaattatggcctgatgcgaaagtattcacacacgaagaggcaagttctaccgattacggcctattagtccgaaacgccatacaggagtggtcctcagatcttgagcagattagcggttcgaaagcttttggctgtaattacaggcaggaaaacgacaaaaccaaacttgtttgcattgttgcttccgaacagtga

SEQ ID NO: 86 - DNA, 678 bp, Ancylostoma ceylanicum
atgactgctttcatttcctatattgtttccacagcgtgttacacatacaactatcagatttgtaattttgttcagtatatttgtcatcattctctctgttcatgccctaacattccttcacaaaataacccgagtgtcttatatgtaaatgttttgtggactcccacgcaaattttagaaggccttctctgggcaaaagggttgggggtgtgggaggccggagcagatccactgtgccacgccaccatgggtttctttagcggcttgatttttgcggcactctgcctccttcacgttacatcttctgcagtgatgaatgatgaagttcccgagtgtgaagaactcaagcggaaggcgcttagaatggaacaacgggatactttggtcgtccgacttaatgaagcgttgaagaatgtcgacgttacgaaatactcctgccctctcgagagaattgcccagtcccgtaagcacaaacctggccgcaaattatggcctgatgcgaaagtattcacacacgaagaggcaagttctaccgattacggcctattagtccgaaacgccatacaggagtggtcctcagatcttgagcagattagcggttcgaaagcttttggctgtaattacaggcaggaaaacgacaaaaccaaacttgtttgcattgttgcttccgaacagtga

SEQ ID NO: 87 - DNA, 567 bp, Ancylostoma ceylanicum
atgtctcaggcggcaccagctggtatctcagacaatgactgccaggctaccagtcggtatgtctttgtttttttttttcttctcgtgaacactaacacgaactgctcattatctctcgctatgcacgtgcttaaccgtcgtcaggttttcaacattcctgaggttgtcagcactcctcgtcaaccatgcgatcctgctattggaacgtacgctaatcgagacaaagtcctaggtcccttggcagaacaaatttcaaaaactgtgcaaggaaatacgaagtactcttgcgcactggaagcagccgctaatttcaagttcgtttacttgggagaggagagatggagtaagagttatccgaacgtgaactacaaaaaggaactgaaatatagcacagtaagagttggatggcccttgacggacttcgagggcctggccagagaagctgttgacaagtggtcaagtgaactaaaagagatacgagggggtcatttcggctgcactatcaacgaagtacataagcgtaactctctcgaagccaaatacagtattttctgtctcttcaaataa

SEQ ID NO: 88 - DNA, 633 bp, Ancylostoma ceylanicum
atgtctcaggcggcaccagctggtatctcagacaatgactgccaggctaccagtcggtatgtctttgtttttttttttcttctcgtgaacactaacacgaactgctcattatctctcgctatgcacgtgcttaaccgtcgtcaggatcgctgtaaacgttgtccagtagcaccgctcaacaagatgctctccgcttgtctacttttcttggttttcaacattcctgaggttgtcagcactcctcgtcaaccatgcgatcctgctattggaacgtacgctaatcgagacaaagtcctaggtcccttggcagaacaaatttcaaaaactgtgcaaggaaatacgaagtactcttgcgcactggaagcagccgctaatttcaagttcgtttacttgggagaggagagatggagtaagagttatccgaacgtgaactacaaaaaggaactgaaatatagcacagtaagagttggatggcccttgacggacttcgagggcctggccagagaagctgttgacaagtggtcaagtgaactaaaagagatacgagggggtcatttcggctgcactatcaacgaagtacataagcgtaactctctcgaagccaaatacagtattttctgtctcttcaaataa

SEQ ID NO: 89 - DNA, 705 bp, Ancylostoma ceylanicum
atgcaaagaagttctataacaagtggcaagacttacgtcatcttgggagcctgccaagtggcaagattgttgaaacagaccgcggcaccagctggtatctcagacaatgactgccaggctaccagtcggtatgtctttgtttttttttttcttctcgtgaacactaacacgaactgctcattatctctcgctatgcacgtgcttaaccgtcgtcaggatcgctgtaaacgttgtccagtagcaccgctcaacaagatgctctccgcttgtctacttttcttggttttcaacattcctgaggttgtcagcactcctcgtcaaccatgcgatcctgctattggaacgtacgctaatcgagacaaagtcctaggtcccttggcagaacaaatttcaaaaactgtgcaaggaaatacgaagtactcttgcgcactggaagcagccgctaatttcaagttcgtttacttgggagaggagagatggagtaagagttatccgaacgtgaactacaaaaaggaactgaaatatagcacagtaagagttggatggcccttgacggacttcgagggcctggccagagaagctgttgacaagtggtcaagtgaactaaaagagatacgagggggtcatttcggctgcactatcaacgaagtacataagcgtaactctctcgaagccaaatacagtattttctgtctcttcaaataa

SEQ ID NO: 90 - DNA, 525 bp, Ancylostoma ceylanicum
atgttctccgctggtttacttttcctagtaagaaaaccaatttcaccgctcaaacagttttaccatcgaagatatcacctgattttgtgtttatgcaaagtatttttacagcttttcaacatcttcgagatgggcagcaccttccgtgaaaactgcgatccttcagttggaacgttccctaatcccaatagcgtcttgaatcctctggcgaaacttatagaagaaacgtcaggaaaaccattgtattcttgcgctctggaaccacgagcttatctcaagttcgttcaattgacgcccgagcagtggaataaggtttacggaaatgtgaagtacaagaaggagctggtgtacaccacggaaaaagatgaaaatgatttggaaaacccgagaatgctggttgaggaagctgttgcgaagtggtcggatgaactgcagcagattcaagggggaaaatttggctgcattgtcgatcgcaagaagaactcgcacaaactcatctacaaacttggctgtcttttcatctga

SEQ ID NO: 91 - DNA, 396 bp, Ancylostoma ceylanicum
atgggcagcaccttccgtgaaaactgcgatccttcagttggaacgttccctaatcccaatagcgtcttgaatcctctggcgaaacttatagaagaaacgtcaggaaaaccattgtattcttgcgctctggaaccacgagcttatctcaagttcgttcaattgacgcccgagcagtggaataaggtttacggaaatgtgaagtacaagaaggagctggtgtacaccacggaaaaagatgaaaatgatttggaaaacccgagaatgctggttgaggaagctgttgcgaagtggtcggatgaactgcagcagattcaagggggaaaatttggctgcattgtcgatcgcaagaagaactcgcacaaactcatctacaaacttggctgtcttttcatctga

SEQ ID NO: 92 - DNA, 324 bp, Ancylostoma ceylanicum
atggaatgtacaactgccggtttaatttgctggttaaccggcagttatagtgcaattactacggcccctggttctcagttgtacaagtgcgacctggaaaaccttgctgcccgcagaatacttaatcctacggcaaaccctctaccagctgaagctaaggaactaaaagctgaaggtgcttggcacaacgacttcataaaagataccgctaaatcgtggtcaacggagctggaggaggtgagaagcaagaggcacttcggatgtttctacattgtttctggagagcaggagaaaattgcaaaactcgcttgtgttttccaataa

SEQ ID NO: 93 - DNA, 258 bp, Ancylostoma ceylanicum
atgcagtctcagttgtacaagtgcgacctggaaaaccttgctgcccgcagaatacttaatcctacggcaaaccctctaccagctgaagctaaggaactaaaagctgaaggtgcttggcacaacgacttcataaaagataccgctaaatcgtggtcaacggagctggaggaggtgagaagcaagaggcacttcggatgtttctacattgtttctggagagcaggagaaaattgcaaaactcgcttgtgttttccaataa

SEQ ID NO: 94 - DNA, 432 bp, Ancylostoma ceylanicum
atggctgccagcattcgagctatatttttggtcgtttgcgttctttcgtggtgttccaacgtcctatccacgaagctctcagatcttccaaagtgtccaaaatcagaaggagtagagctgccggaaaatattcgtagtgccatttatgaagaggtttctaagtggacatcgaaaaagccggagtactcctgttatctggaaggatccgctgcgctcactgtattgaagaacaagggcagaagcagttctgatgatgaagtagaaatgcttcgcacaggccgttggactcccaccttcataagtgatgccgtaaaatggtgggcaccggagctgaagaagatgacagcattgaagagcataggctgtttctacagagcgagcgaaagcggcaaaaaaactgcaaggctggcttgtgttttcaaatcctcttag

SEQ ID NO: 95 - DNA, 471 bp, Ancylostoma ceylanicum
atgactgccagcatttgggttctattttgggctgcttgcgttcttctgtgcagtaccagtgtattgtccatgagaaccagacatcttccacaaattccaaaatgccgtgactcggagggattgcatatgtcggagaacactcgaaagcgaatttttagacaggtgtccaaatggttaccgaaaagtgtgaagtatggatgtgatctggaaaaagtcgctgctatcactatagcggagcctgatagattacagggagatccacgagatggaatagatgagcttagcgttaaaggcccttggcgtcccaattttatagaagatatcgtaaagtggtggtcaccgataataaagaggatggatgctgtgacggacgttggctgtttctacatggccaccgaaagagaatcaggaactgccgagctggcttgtgatttcaaaaccccgtacgaaaagctcaaatgggaagaatga

SEQ ID NO: 96 - DNA, 453 bp, Ancylostoma ceylanicum
atggcttccagcatttggactctatttttggtcttttgcgttctttcatatggttccaacgcaatgcgtcaacgcagcgcgaggatgcgatcctcaggtggtcgaaattgccgtggatcgggcttgccagagaacataaggaaccaaatttccgaacggatttataagtggataccgcaatctgcggaatattcctgtgagcttgaagatgccgccgctacgctagtcttggagaacaggagcaaaatcagttctggtgatgtagtagaaatgatcaacggagggcctaggaaacccacattcatagctgatgccgtaaggtattggtcaccggagctggagaggatgaaagatatagacagcttcggctgtttcttcagaggcgcgagaggatcgggcagaaacactgccaagctggcttgtcttttccgatccggtcgcgattattattaa

SEQ ID NO: 97 - DNA, 729 bp, Ancylostoma ceylanicum
atgaatctggcaaagggctgtagaacatgtgttacgatcctttttctgccaccagaggcagattctaactggtctggtcttactcccctacaaccagctgagtatcgatcgccagctcgcgtcatggcgagcgagaaacacaaacaacaagaaactattttacccaggtggacaccggagctggagagggtgagtcacgagcttgacatctcctctttttcgcgtgctgacaagtcagttccttacagaaggccgagcaacttaccgtcggctgcaatggcttccagcatttggactctatttttggtcttttgcgttctttcatatggttccaacgcaatgcgtcaacgcagcgcgaggatgcgatcctcaggtggtcgaaattgccgtggatcgggcttgccagagaacataaggaaccaaatttccgaacggatttataagtggataccgcaatctgcggaatattcctgtgagcttgaagatgccgccgctacgctagtcttggagaacaggagcaaaatcagttctggtgatgtagtagaaatgatcaacggagggcctaggaaacccacattcatagctgatgccgtaaggtattggtcaccggagctggagaggatgaaagatatagacagcttcggctgtttcttcagaggcgcgagaggatcgggcagaaacactgccaagctggcttgtcttttccgatccggtcgcgattattattaa

SEQ ID NO: 98 - DNA, 447 bp, Ancylostoma ceylanicum
atggctgcccgtctttggactctactttgggccatttgcgttcttgcgtgcgtttgcaacgtattgtcgtgtgggtcctgttcatctagaccaagtcctccaaaatgccctaaaacagatgaaggaaagctgtcgaaggatgttcgaaaactcatttataaatatgtttataagcgagcgccgacaaggccgaattattcctgcagtctggaaaaggatgccgcaaaggtgttatcgcatcatgggcgtcctgaagacaacgaagatggaaaaacatatctaagccttatgggcccttggcgttctagcttcataaaagatgccataaagtggtggtccccgcaattgaagaagatggatggtttgaagagcgtgggctgtttctacaaagcggatgaaacagatacaggaattggcgagctcacttgcgctttcgaatccagttaa

SEQ ID NO: 99 - DNA, 444 bp, Ancylostoma ceylanicum
atggctgccaacattaggactctattttgggccattctcgttctttcgtgcttttccaacgtgttgccctggggaatcatacagcttccgatgtgcagtgaatcggaaatgcatgtgacggcgagtattcgaagtcgcatctataaagagattaccaagtatctacccagatctccgagctattcctgtgatctggaagagtccgctgctattgtaataattcggagaataacttcgcatgaagaggatggagaagaagagctaagtcatagaggcccatggcgccccagcttcatagaagatgtcatacactggtggtcgccgatactaaagagcatggaacgtgtgaagagcgtcggctgtttctacagagctatcaaagaagaggtaaaaactggcgagctgtcgtgtgctttcgaattcaagaaaagcagttggtggtga

SEQ ID NO: 100 - DNA, 351 bp, Ancylostoma ceylanicum
atggctgccaacattaggactctattttgggccattctcgttctttcgtgcttttccaacgtgttgccctggggaatcatacagcttccgatgtgcagtgaatcggaaatgcatgtgacggcgagtattcgaagtcgcatctataaagagattaccaagtatctacccagatctccgagctattcctgtgatctggaagagtccgctgctattgtaataattcggagaataacttcgcatgaagaggatggagaagaagagctaagtcatagaggattgttcccgatggtttcttcaccaaggcgagaatcagctattgtttttgcagcccatggcgccccagcttcatag

SEQ ID NO: 101 - DNA, 489 bp, Ancylostoma ceylanicum
atgagctcgaaaatgcagacacatcagcaggtgctttgcgctatgtcatctcttcctgaacttattatctgtgttttctgtctcgtcttccccatctatcctgctggaacaacgcaggaatttcccaaatgcgagcgaaagcatttgggggaagtggaacaggtcctgttcgcgggtatgctccctaggctagctgaccttattattgaaggtttaccaaagcagaatcatcctcaatacacatgcggaatggaaaagctcgctcataaagttgtgctcggtaaaagtatagccaatcattataaaatcacgaaacacaatggacctgataacattgttttctggagggttgttaaagagtactggaaataccaactggagaacatgggcaaagtaaagaaattcggctgtgactttgctgaatcgacaaaacgtgtgagcggactaacgaaaaccacaaattacacgatcgcatgtgttttcaagtga

SEQ ID NO: 102 - DNA, 477 bp, Ancylostoma ceylanicum
atgcagacacatcagcaggtgctttgcgctatgtcatctcttcctgaacttattatctgtgttttctgtctcgtcttccccatctatcctgctggaacaacgcaggaatttcccaaatgcgagcgaaagcatttgggggaagtggaacaggtcctgttcgcgggtatgctccctaggctagctgaccttattattgaaggtttaccaaagcagaatcatcctcaatacacatgcggaatggaaaagctcgctcataaagttgtgctcggtaaaagtatagccaatcattataaaatcacgaaacacaatggacctgataacattgttttctggagggttgttaaagagtactggaaataccaactggagaacatgggcaaagtaaagaaattcggctgtgactttgctgaatcgacaaaacgtgtgagcggactaacgaaaaccacaaattacacgatcgcatgtgttttcaagtga

SEQ ID NO: 103 - DNA, 384 bp, Ancylostoma ceylanicum
atgttcacttctggtttgcttctcctgatcttcaacatcttcgaggtggtgagcgcctctggtcgaagctgcgacccttcaagtggaacataccctaatccgggcagggtcttagatcctttggtcgagaaaattttgctgaatgtgaagggaaatccagagtacgattgcgagtacgaaaaagccattgatctcaagctcaccttggacgatgacggagaaatgatgagggaagattacccgcacgtaacggggaaggaactggatttcaaagtaactaagaatggggacactgagaaaacgctgccagaaacactggttgacgaggttctccaaaattggtcgggtcaactgcccaatgtgagtcccttatcgaatcaatag

SEQ ID NO: 104 - DNA, 426 bp, Ancylostoma ceylanicum
atgttcacttctggtttgcttctcctgatcttcaacatcttcgaggtggtgagcgcctctggtcgaagctgcgacccttcaagtggaacataccctaatccgggcagggtcttagatcctttggtcgagaaaattttgctgaatgtgaagggaaatccagagtacgattgcgagtacgaaaaagccattgatctcaagctcaccttggacgatgacggagaaatgatgagggaagattacccgcacgtaacggggaaggaactggatttcaaagtaactaagaatggggacactgagaaaacgctgccagaaacactggttgacgaggttctccaaaattggtcgggtcaactgcccaatctgctcattgctgacgacggtgcactcaaaataggctaccaaggactcactgtagtccaacattag

SEQ ID NO: 105 - DNA, 444 bp, Ancylostoma ceylanicum
atgttcacttctggtttgcttctcctgatcttcaacatcttcgaggtggtgagcgcctctggtcgaagctgcgacccttcaagtggaacataccctaatccgggcagggtcttagatcctttggtcgagaaaattttgctgaatgtgaagggaaatccagagtacgattgcgagtacgaaaaagccattgatctcaagctcaccttggacgatgacggagaaatgatgagggaagattacccgcacgtaacggggaaggaactggatttcaaagtaactaagaatggggacactgagaaaacgctgccagaaacactggttgacgaggttctccaaaattggtcgggtcaactgcccaatgtagccaacaaattcggctgcaacatcgatagagatgaggacccgaaaacaaccacattcaaaattagttgcatttttagctag

SEQ ID NO: 106 - DNA, 513 bp, Ancylostoma ceylanicum
atgttcacttctggtttgcttctcctgatcttcaacatcttcgaggtggtgagcgcctctggtcgaagctgcgacccttcaagtggaacataccctaatccgggcagggtcttagatcctttggtcgagaaaattttgctgaatgtgaagggaaatccagagtacgattgcgagtacgaaaaagccattgatctcaagctcaccttggacgatgacggagaaatgatgagggaagattacccgcacgtaacggggaaggaactggatttcaaagtaactaagaatggggacactgagaaaacgctgccagaaacactggttgacgaggttctccaaaattgaactattgtgatcagcaccaaaaataaccgggatgctcagtctttgagctcacggcagcaactctggttttttaaaactttattttgctcttcccgcacacttcgcggtcatgacacacctccagattctaacaagtttatttgctgcacaatcgaattcacggaattttga

SEQ ID NO: 107 - DNA, 486 bp, Ancylostoma ceylanicum
atgtcgctctctataaaaggcaggaggaaagccggcccagcacagcctgcaatcatgctttctcctgcctttgttctagtgcttctcaacattctttcggtgacagcctggaaatgtgacgttaccagttcttcgtatggggatccaactatggttctagagcccttggagaaggaaatttctaagaagctgtcggacaagcaagcgtcgtatgattgcgacttggaagtaggggctcttaatctaattttacttgacgacgcggaaatggattacaaggagaagctcgttttcaaaacgacaatagaagggcattatcctgtggaacaagcgagaacctatgtcactgacgctgttggtgaatggttgaacaagctggaagagatgcaaggcccagtgcaattcggctgtaacgttgaattagatcaggatcaaaatttgggaaaacagacttccacgttcacgattgcatgtcttttcaaatag

SEQ ID NO: 108 - DNA, 519 bp, Ancylostoma ceylanicum
atgtcgctctctataaaaggcaggaggaaagccggcccagcacagcctgcaatcatgctttctcctgcctttgttctagtgcttctcaacattctttcggtgacagcctggaaatgtgacgttaccagttcttcgtatggggatccaactatggttctagagcccttggagaaggaaatttctaagaagctgtcggacaagcaagcggaggccaacactggcataccaaactattttcagtcgtatgattgcgacttggaagtaggggctcttaatctaattttacttgacgacgcggaaatggattacaaggagaagctcgttttcaaaacgacaatagaagggcattatcctgtggaacaagcgagaacctatgtcactgacgctgttggtgaatggttgaacaagctggaagagatgcaaggcccagtgcaattcggctgtaacgttgaattagatcaggatcaaaatttgggaaaacagacttccacgttcacgattgcatgtcttttcaaatag

SEQ ID NO: 109 - DNA, 432 bp, Ancylostoma ceylanicum
atgctttctcctgcctttgttctagtgcttctcaacattctttcggtgacagcctggaaatgtgacgttaccagttcttcgtatggggatccaactatggttctagagcccttggagaaggaaatttctaagaagctgtcggacaagcaagcgtcgtatgattgcgacttggaagtaggggctcttaatctaattttacttgacgacgcggaaatggattacaaggagaagctcgttttcaaaacgacaatagaagggcattatcctgtggaacaagcgagaacctatgtcactgacgctgttggtgaatggttgaacaagctggaagagatgcaaggcccagtgcaattcggctgtaacgttgaattagatcaggatcaaaatttgggaaaacagacttccacgttcacgattgcatgtcttttcaaatag

SEQ ID NO: 110 - DNA, 465 bp, Ancylostoma ceylanicum
atgctttctcctgcctttgttctagtgcttctcaacattctttcggtgacagcctggaaatgtgacgttaccagttcttcgtatggggatccaactatggttctagagcccttggagaaggaaatttctaagaagctgtcggacaagcaagcggaggccaacactggcataccaaactattttcagtcgtatgattgcgacttggaagtaggggctcttaatctaattttacttgacgacgcggaaatggattacaaggagaagctcgttttcaaaacgacaatagaagggcattatcctgtggaacaagcgagaacctatgtcactgacgctgttggtgaatggttgaacaagctggaagagatgcaaggcccagtgcaattcggctgtaacgttgaattagatcaggatcaaaatttgggaaaacagacttccacgttcacgattgcatgtcttttcaaatag

SEQ ID NO: 111 - DNA, 585 bp, Ancylostoma ceylanicum
atgtacacatggagggtatgctcttttggagagcaatgtcctcgatggatgaaaaacaccgcattgttgatcaaagggttcatcccatataaaaaagatggcggtgcccaccaccggtgtcgcaacattatggctgctatcaacgtttccttccctgctgtgattctcgttctttctgttggaatggtgctctcagcgcctccggccataggaggcgacatccagcgactgcccgactgcaaggatctaggagacaccgcgctcaaaagcaacattcgcacacgcgttgcaactgaagttgttgtggcaaagaaggaagatatgaaatacgactgcaatctggaaggctttgcttctctcttcttaaccaaccgaaggcttttcgaggtctacactgcaaacgtgctcattgtgcaaaccgaattcgaagagaagaaagccgataacgacaaagtacgcaactttattcgaaaagctgttgagtcgtggaagcctttctatgatgagatgggccccaagagcacgttcggttgcaactatcaactcaaaggcaacaaacacaagattgcttgcctttacatgtga

SEQ ID NO: 112 - DNA, 537 bp, Ancylostoma ceylanicum
atgaaaaacaccgcattgttgatcaaagggttcatcccatataaaaaagatggcggtgcccaccaccggtgtcgcaacattatggctgctatcaacgtttccttccctgctgtgattctcgttctttctgttggaatggtgctctcagcgcctccggccataggaggcgacatccagcgactgcccgactgcaaggatctaggagacaccgcgctcaaaagcaacattcgcacacgcgttgcaactgaagttgttgtggcaaagaaggaagatatgaaatacgactgcaatctggaaggctttgcttctctcttcttaaccaaccgaaggcttttcgaggtctacactgcaaacgtgctcattgtgcaaaccgaattcgaagagaagaaagccgataacgacaaagtacgcaactttattcgaaaagctgttgagtcgtggaagcctttctatgatgagatgggccccaagagcacgttcggttgcaactatcaactcaaaggcaacaaacacaagattgcttgcctttacatgtga

SEQ ID NO: 113 - DNA, 456 bp, Ancylostoma ceylanicum
atggctgctatcaacgtttccttccctgctgtgattctcgttctttctgttggaatggtgctctcagcgcctccggccataggaggcgacatccagcgactgcccgactgcaaggatctaggagacaccgcgctcaaaagcaacattcgcacacgcgttgcaactgaagttgttgtggcaaagaaggaagatatgaaatacgactgcaatctggaaggctttgcttctctcttcttaaccaaccgaaggcttttcgaggtctacactgcaaacgtgctcattgtgcaaaccgaattcgaagagaagaaagccgataacgacaaagtacgcaactttattcgaaaagctgttgagtcgtggaagcctttctatgatgagatgggccccaagagcacgttcggttgcaactatcaactcaaaggcaacaaacacaagattgcttgcctttacatgtga

SEQ ID NO: 114 - DNA, 408 bp, Ancylostoma ceylanicum
atgatgcctcttgtcggtttcattgcttttgtcgtctacctgttggcttcggcttcggctcaaacagtgccggactgcacgaaaaacaacagatgggcacctggatacttgcccgagctccccatgattcgcgagaatttcttccatacgattgataagatcaagaaaggcatgagatacagctgctacttggaaaaacttgctcacaatcttgtaaaggagcctttggaatgcatagggtccccctacaagatcacatttgccgacggaccaacgaatctaatcaaactcgggaagattgtgaacggatggaaggatcaactgacaaacatgggtagagttcgcgaattcggttgcaatcttttgcaatttggtgacaaacacagagtcgcttgtgtctacaagtag

SEQ ID NO: 115 - DNA, 405 bp, Ancylostoma ceylanicum
atgcctcttgtcggtttcattgcttttgtcgtctacctgttggcttcggcttcggctcaaacagtgccggactgcacgaaaaacaacagatgggcacctggatacttgcccgagctccccatgattcgcgagaatttcttccatacgattgataagatcaagaaaggcatgagatacagctgctacttggaaaaacttgctcacaatcttgtaaaggagcctttggaatgcatagggtccccctacaagatcacatttgccgacggaccaacgaatctaatcaaactcgggaagattgtgaacggatggaaggatcaactgacaaacatgggtagagttcgcgaattcggttgcaatcttttgcaatttggtgacaaacacagagtcgcttgtgtctacaagtag

SEQ ID NO: 116 - DNA, 423 bp, Ancylostoma ceylanicum
ttcctcctcttcttcactgttacggcacagccagcacctcctgcaatcggaggcgacatccaacggctgcccgagtgtaccgagttaggagctaatgccctccgcaagaacattcgtgaacgcgttttcactgaagttattgtggctaaaaaggaaaatatgaagtacgactgcagtctagaaggttatgcctccctcttcttgagcagccaaagcctttaccgcgtctacacggcgagcgtgaacatagtgcacaccgagttcgaagatgcaaaggccgacaactacaaagtacgtgatttcatcagaaaagcggtgagatcatggggcacttcccttacacagatgggccataagaacttgttcggctgcaactatcagctcaaagacaacaaatacaaagtcgtttgtctttacatgtaa

SEQ ID NO: 117 - DNA, 405 bp, Ancylostoma ceylanicum
atggttgcctctctagccgtcttgatacctgctttcctcctcttcttcactgttacggcacagccagcacctcctgcaatcggaggcgacatccaacggctgcccgagtgtaccgagttaggagctaatgccctccgcaagaacattcgtgaacgcgttttcactgaagttattgtggctaaaaaggaaaatatgaagtacgactgcagtctagaaggttatgcctccctcttcttgagcagccaaagcctttaccgcgtctacacggcgagcgtgaacatagtgcacaccgagttcgaagatgcaaaggccgacaactacaaagtacgtgatttcatcagaaaagcggtgagatcatggggcacttcccttacacaggtgagatacgtttgtaatcgtttgtaa

SEQ ID NO: 118 - DNA, 456 bp, Ancylostoma ceylanicum
atggttgcctctctagccgtcttgatacctgctttcctcctcttcttcactgttacggcacagccagcacctcctgcaatcggaggcgacatccaacggctgcccgagtgtaccgagttaggagctaatgccctccgcaagaacattcgtgaacgcgttttcactgaagttattgtggctaaaaaggaaaatatgaagtacgactgcagtctagaaggttatgcctccctcttcttgagcagccaaagcctttaccgcgtctacacggcgagcgtgaacatagtgcacaccgagttcgaagatgcaaaggccgacaactacaaagtacgtgatttcatcagaaaagcggtgagatcatggggcacttcccttacacagatgggccataagaacttgttcggctgcaactatcagctcaaagacaacaaatacaaagtcgtttgtctttacatgtaa

SEQ ID NO: 119 - DNA, 567 bp, Ancylostoma ceylanicum
atggttgcctctctagccgtcttgatacctgctttcctcctcttcttcactgttacggcacagccagcacctcctgcaatcggaggcgacatccaacggctgcccgagtgtaccgagttaggagctaatgccctccgcaagaacattcgtgaacgcgttttcactgaagttattgtggctaaaaaggaaaatatgaagtacgactgcagtctagaaggttatgcctccctcttcttgagcagccaaagcctttaccgcgtctacacggcgagcgtgaacatagtgcacaccgagttcgaagatgcaaaggccgacaactacaaagtacgtgatttcatcagaaaagcggtgagatcatggggcacttcccttacacagagacagtctttgagaactgaaggtgagacaatgacgctggcacgcacgcagtggaagtcgaattcatctcgaggtctcttcagagtcccgagagataacccaaacttctgtgcagcaacgagaaggcgtaacctccagattctagaaaaccttctgatattttccgagatgagtgtagtaccactatag

SEQ ID NO: 120 - DNA, 312 bp, Ancylostoma ceylanicum
atggagttcgtgtccacgaaacagtttgggacgaattttagcggacgagtacattttgatccaagtccgaaaaccacaacagaagtatacacctgcggtttggaaaaccgcgcctatgagttcgtgagaaacggtgggccttccatccagatcggaggcaatgtcctttacgaggaacgtactggaagacataatctgagggaggttgttagtaggtggagcgaaagactgaagtctatggccaagaagaaattcggatgcaatctttcgatcgatgcaagtggatacaaggtcgcttgtgttttcaagtaa

SEQ ID NO: 121 - DNA, 249 bp, Ancylostoma ceylanicum
atgttctccaaccttccactcggagatagctatgtggtttgcacttaccatttaatagcgctttcacgcggcgtaccggaatgtaccggattgggagaacacactatgcagcgcgatgtgaaagatgatttggtaccgaaagttcttcgttattcaccgaatcaagaaatcgcaagcatatcatcggtgagccttaaggaatgcgtgctacaaatcagagtatccccagacttcgccagttcgaaatga

SEQ ID NO: 122 - DNA, 426 bp, Ancylostoma ceylanicum
atgatgtcctcagttggtttgctgttcctgcttttcaatattatcgagatggtcagcgcctctcgccacagctgcaatccttctagtgggacattccctgatccggacagagtcctgaatcctttggcgagagagatttcacaaaaaatgccaggatatccattatatgcttgcgccttggaaccaccagcttatctcaagttcgttctcttgagcgaggaccagtggaacagggtttacccaaatgtgaagtacacgaaagagttgaaatacagcactgattctctagacgacccggagggcctggccaagaaagccgtcgagaagtggtcaagagaaatgggaggaacggaaacccgcagattcggctgcaacattaatgaggaggccaaaggcacataccagattgcttgtctcttcaaatga

SEQ ID NO: 123 - DNA, 423 bp, Ancylostoma ceylanicum
atgtcctcagttggtttgctgttcctgcttttcaatattatcgagatggtcagcgcctctcgccacagctgcaatccttctagtgggacattccctgatccggacagagtcctgaatcctttggcgagagagatttcacaaaaaatgccaggatatccattatatgcttgcgccttggaaccaccagcttatctcaagttcgttctcttgagcgaggaccagtggaacagggtttacccaaatgtgaagtacacgaaagagttgaaatacagcactgattctctagacgacccggagggcctggccaagaaagccgtcgagaagtggtcaagagaaatgggaggaacggaaacccgcagattcggctgcaacattaatgaggaggccaaaggcacataccagattgcttgtctcttcaaatga

SEQ ID NO: 124 - DNA, 456 bp, Ancylostoma ceylanicum
atggcggcaggcaaagtggccctctacaatgatgtcctcagttggtttgctgttcctggtgagctaatcaatccagacagtttcctactatgcacctcatcttacatctatgtgaatgggacattccctgatccggacagagtcctgaatcctttggcgagagagatttcacaaaaaatgccaggatatccattatatgcttgcgccttggaaccaccagcttatctcaagttcgttctcttgagcgaggaccagtggaacagggtttacccaaatgtgaagtacacgaaagagttgaaatacagcactgattctctagacgacccggagggcctggccaagaaagccgtcgagaagtggtcaagagaaatgggaggaacggaaacccgcagattcggctgcaacattaatgaggaggccaaaggcacataccagattgcttgtctcttcaaatga

SEQ ID NO: 125 - DNA, 549 bp, Ancylostoma ceylanicum
atgaaaaaacacgaccacgtggcaggtcaaagcgacacaaagacatcgacaatcggcttcccaactattcttcttgtttacagagctcgtctaatggcggcaggcaaagtggccctctacaatgatgtcctcagttggtttgctgttcctggtgagctaatcaatccagacagtttcctactatgcacctcatcttacatctatgtgaatgggacattccctgatccggacagagtcctgaatcctttggcgagagagatttcacaaaaaatgccaggatatccattatatgcttgcgccttggaaccaccagcttatctcaagttcgttctcttgagcgaggaccagtggaacagggtttacccaaatgtgaagtacacgaaagagttgaaatacagcactgattctctagacgacccggagggcctggccaagaaagccgtcgagaagtggtcaagagaaatgggaggaacggaaacccgcagattcggctgcaacattaatgaggaggccaaaggcacataccagattgcttgtctcttcaaatga

SEQ ID NO: 126 - DNA, 438 bp, Ancylostoma ceylanicum
atgactcatttgtacgctcttgttattcttctgtcggctatagctctcttggaaagcattcaaacgagacccaattgctctcagcttggaaaatatgctcttgatcctgatttgagggagcggttggcaacggaaatcatcgctaaccagcccataaaggacgtgagcgttccgctagtgtacctatgcgctctagaagggatggccggattaatactggagaattcacagaaaccgctgaactgcctcagtgatctcggaatattcccacttatcacagaaatggatgacgaagcagatgcgggcgtcgatgctctcgctaaggcagccgttggagaatgggcattgcacattcctcggctaacatttgcttcaagcttcggatgcaaccacgttctcgaagatgggagacatatatacttgtgtctttttaaataa

SEQ ID NO: 127 - DNA, 297 bp, Ancylostoma ceylanicum
atgatctactcgcacgttcttgctattttcctgccagtcatagcgctttcaagaagcatctatgttcaaaaggctcacagttgtcgtcaattgggagactacgcctttcgttctaaactaagagatcgcatggctacaggaatcatgttttatcagggcacactacatatgagtactaccagggtgtatctgtgcgctctagaaggattggctggactaattctggagaatccacaaaaaccggtgaattgcaccatcgatctcagaatctttccactcacttttgaaaggtgctaa

SEQ ID NO: 128 - DNA, 327 bp, Ancylostoma ceylanicum
atgatctactcgcacgttcttgctattttcctgccagtcatagcgctttcaagaagcatctatgttcaaaaggctcacagttgtcgtcaattgggagactacgcctttcgttctaaactaagagatcgcatggctacaggaatcatgttttatcagggcacactacatatgagtactaccagggtgtatctgtgcgctctagaaggattggctggactaattctggagaatccacaaaaaccggtgaattgcaccatcgatctcagaatctttccactcacttttgaaagctgtcagtcgcaacaggctttggatgtaattccgtaa

SEQ ID NO: 129 - DNA, 357 bp, Ancylostoma ceylanicum
atgatctactcgcacgttcttgctattttcctgccagtcatagcgctttcaagaagcatctatgttcaaaaggctcacagttgtcgtcaattgggagactacgcctttcgttctaaactaagagatcgcatggctacaggaatcatgttttatcagggcacactacatatgagtactaccagggtgtatctgtgcgctctagaaggattggctggactaattctggagaatccacaaaaaccggtgaattgcaccatcgatctcagaatctttccactcacttttgaaagaaatattgcagtgatggcaagaacaatgatgtccaatatgtgtccaaggaagctcttcaggctatga

SEQ ID NO: 130 - DNA, 417 bp, Ancylostoma ceylanicum
atgactgagctgtgtaaaattcatgtttcagtcgaccatagggcaattcaatcggttgttcgagaaggcactgaagagaataaatggctgcatgatttcggctccatcactaacacagcaatgatctactcgcacgttcttgctattttcctgccagtcatagcgctttcaagaagcatctatgttcaaaaggctcacagttgtcgtcaattgggagactacgcctttcgttctaaactaagagatcgcatggctacaggaatcatgttttatcagggcacactacatatgagtactaccagggtgtatctgtgcgctctagaaggattggctggactaattctggagaatccacaaaaaccggtgaattgcaccatcgatctcagaatctttccactcacttttgaaaggtgctaa

SEQ ID NO: 131 - DNA, 204 bp, Ancylostoma ceylanicum
atggtagagaatttgtttgcatttaggatcctcagacctatgagaaattatcgaccgccagtttcatggataatgaactttttaaataagaccatcgaagagtggaaggataaaatccaaaagatgggacacaaatcgcgtttcggatgccaactccagaaaacggtagcaaatgacaaagttgtctgcctcttccaagactga

SEQ ID NO: 132 - DNA, 438 bp, Ancylostoma ceylanicum
atgatttccccattcctgttggctcttcaggtgttcttcgcttttccaacgcaaggcctagccacaaagaaaggcacaggctgtggttgctttggatatttttatccatgtcgcaatgaaacacttcggaagcacctagcagatggaattctaagcgcctggacatcggacgaaaataaaccaaaatatcgctgcgacctccagtccgaaagtcaagaagtgcttctgaattctcaatattactggacacgcaatgatagctgggcaaaattagaacaccgaaggaaaggaaattttcgctatcaaactgatcaaatgttaacggactttttgaacgaaagtgtcgaagtttggaaggatggaagcaaattcgatgcggtgaggcgttggtgcatcgatgttgtttgtttttttttttttgaaaaatgggttgtgtaa

SEQ ID NO: 133 - DNA, 456 bp, Ancylostoma ceylanicum
atgatttccccattcctgttggctcttcaggtgttcttcgcttttccaacgcaaggcctagccacaaagaaaggcacaggctgtggttgctttggatatttttatccatgtcgcaatgaaacacttcggaagcacctagcagatggaattctaagcgcctggacatcggacgaaaataaaccaaaatatcgctgcgacctccagtccgaaagtcaagaagtgcttctgaattctcaatattactggacacgcaatgatagctgggcaaaattagaacaccgaaggaaaggaaattttcgctatcaaactgatcaaatgttaacggactttttgaacgaaagtgtcgaagtttggaaggatggaagcaaattcgatgcggtaaaagggagaacatattttggatgccaactcactgctaatgtcaaagagaagatagttgtctgcctctttgaataa

SEQ ID NO: 134 - DNA, 291 bp, Ancylostoma ceylanicum
atgacttccacacttttgttagctgttcaggattatttctgttttttcgaatccgctgccggatacgagctgcaggatccgaacacatacaaaaggattttcaaggaactgaggatcacaaagttggaatatgaaggaggaaaggggacgtacaattcgatagcagcctttctgaatgctagtgctcagaattggactactcaactaagaaaaatggaacacaaatacaagtttggatgtcaatgctctaataagaatggagagtaccaacttgtctgccttttcgcgtga

SEQ ID NO: 135 - DNA, 444 bp, Ancylostoma ceylanicum
atgacttccacacttttgttagctgttcaggtgctttcctctttttcgcaactactcccccctgaagaggattatacggacccgccagactgttttcctttgggtaggtgtcttgatgccaacgcacggaaatgcatagcagcacagattgaagatatcaaggatcagtgtgatgggggaccggattatttctgttttttcgaatccgctgccggatacgagctgcaggatccgaacacatacaaaaggattttcaaggaactgaggatcacaaagttggaatatgaaggaggaaaggggacgtacaattcgatagcagcctttctgaatgctagtgctcagaattggactactcaactaagaaaaatggaacacaaatacaagtttggatgtcaatgctctaataagaatggagagtaccaacttgtctgccttttcgcgtga

SEQ ID NO: 136 - DNA, 459 bp, Ancylostoma ceylanicum
atgatcaccaagtgcagtcattcgaaaacaacgtatttcatacagatattcccgctattttcaatgataaagttaacagccccacatacctggattcctgtggccgagtgcgatattacgtacaagattgacaaatgtgtccgggaggtcatggttaacgcagttatgcatcagatgaagcgaggactgcagtacagctgcttccttgaaaatctcgcaatagttcgcttcgaccagcccgatttctctattgaaggtactccactgaagtatccgaagctcgtatacgaacgcagcagaggcaacgtttcaagtcgtaaaaaagaagcaaggtttttgagggaagctgctgcattctggaaaagaaatatcgaagaggtagaaggcaagaaacaattcgcctgtcagttctccaaaggaaacaacaagtacagggttgtctgcatctttagtgaatga

SEQ ID NO: 137 - DNA, 444 bp, Ancylostoma ceylanicum
atggctccgataactttgctagctcttcagatattcccgctattttcaatgataaagttaacagccccacatacctggattcctgtggccgagtgcgatattacgtacaagattgacaaatgtgtccgggaggtcatggttaacgcagttatgcatcagatgaagcgaggactgcagtacagctgcttccttgaaaatctcgcaatagttcgcttcgaccagcccgatttctctattgaaggtactccactgaagtatccgaagctcgtatacgaacgcagcagaggcaacgtttcaagtcgtaaaaaagaagcaaggtttttgagggaagctgctgcattctggaaaagaaatatcgaagaggtagaaggcaagaaacaattcgcctgtcagttctccaaaggaaacaacaagtacagggttgtctgcatctttagtgaatga

SEQ ID NO: 138 - DNA, 408 bp, Ancylostoma ceylanicum
atgacacttctcccggcgctgacggcttttgttttctatctcctcgtttcttgctctggagtatcatctcaacgtttgccgaattgctcgaaaacagacaaattcggaaccattgcccttcatctcgttcgaatgtttatttctcaagaagtcgatgctatcaagagtggcatgaggtacagctgcccactggaaaagctcgcttataatcttgtgaaagatcccatgcaatgcattggaacctcctaccagatcacattttcgaacggatgtggaagcaatattaacataagagaagtggtgaaagagtggaaggaacagctgacaaagatgagaagagttcgcgaattcggttgcaatatcaatcaaggtgatcacaaatacaagattgcttgcgtttttaagtag

SEQ ID NO: 139 - DNA, 480 bp, Ancylostoma ceylanicum
atgggatcacgggcccgaccggacgagcacgggagccatgtgtccgaaagcgctcgcccacgtggcgcagcgctctacagcggtcatcacaaattggaactggttttctatctcctcgtttcttgctctggagtatcatctcaacgtttgccgaattgctcgaaaacagacaaattcggaaccattgcccttcatctcgttcgaatgtttatttctcaagaagtcgatgctatcaagagtggcatgaggtacagctgcccactggaaaagctcgcttataatcttgtgaaagatcccatgcaatgcattggaacctcctaccagatcacattttcgaacggatgtggaagcaatattaacataagagaagtggtgaaagagtggaaggaacagctgacaaagatgagaagagttcgcgaattcggttgcaatatcaatcaaggtgatcacaaatacaagattgcttgcgtttttaagtag

SEQ ID NO: 140 - DNA, 456 bp, Ancylostoma ceylanicum
atgggtgactcagattcgtgggtcgtctacctcctcgcttcggccgaggctcaaaatgtgccggactgcgcgaaaggaaacagcgatgtacagggaaccttgcctggccctcccatgattcgcaagcatttcttcgaactggttgatacgatcaagaaaggcatgaggtacagctgctacttggaaaaacttgctcacaatcttgtaaaggagcctttggaatgcattgggtccccctacaagatcacatatgccgacggaccaacgagttcagttccactcggaaagattgtgccccgatggaaggatcaactgacaaaaattttatatcgaactgagagagagtcactccacctggttagaggtctgctaagcgggcacttctcacgtggataccactcaatgactgccctacgccatcgtccgcaattcattctcattacgcatcaagcataa

SEQ ID NO: 141 - DNA, 399 bp, Ancylostoma ceylanicum
atgggtgactcagattcgtgggtcgtctacctcctcgcttcggccgaggctcaaaatgtgccggactgcgcgaaaggaaacagcgatgtacagggaaccttgcctggccctcccatgattcgcaagcatttcttcgaactggttgatacgatcaagaaaggcatgaggtacagctgctacttggaaaaacttgctcacaatcttgtaaaggagcctttggaatgcattgggtccccctacaagatcacatatgccgacggaccaacgagttcagttccactcggaaagattgtgccccgatggaaggatcaactgacaaaaatgggtagagttcgcgagttcggttgcaattatttccaaggtcataacaaacacagagtcgcttgtgtttacaagtag

SEQ ID NO: 142 - DNA, 489 bp, Ancylostoma ceylanicum
atgagctcgaaaacgcaaacacatcaccagttgctttgcgctatggcatctcttacagaactgattatctgcgtttccgctctcgttcttttcatttatcccgccggaacaatgccggatgttccgaaatgcaagcggaatttgggggaagtggaagagatcctgtttgcgtctatgcgcccgaggctagctgaccttattattgaaggtttaccacagcagaaccatccgcaatacacatgcgacatggaaaagctcgctcatgaagttgtgctcggtgatgaagatatagccaaccagtataaagtcacaagacacaatggacctgataacattgttttctggagggttgttaaagagtactggaagcaccagctggagaacatgggcaaagttaatgaattcggctgcgattttgctgaattaaaaagtcctgtgaatggccgaatgaaaaccacaaattacacaatcgcgtgtgttttcaactga

SEQ ID NO: 143 - DNA, 447 bp, Ancylostoma ceylanicum
atggcatctcttacagaactgattatctgcgtttccgctctcgttcttttcatttatcccgccggaacaatgccggatgttccgaaatgcaagcggaatttgggggaagtggaagagatcctgtttgcgtctatgcgcccgaggctagctgaccttattattgaaggtttaccacagcagaaccatccgcaatacacatgcgacatggaaaagctcgctcatgaagttgtgctcggtgatgaagatatagccaaccagtataaagtcacaagacacaatggacctgataacattgttttctggagggttgttaaagagtactggaagcaccagctggagaacatgggcaaagttaatgaattcggctgcgattttgctgaattaaaaagtcctgtgaatggccgaatgaaaaccacaaattacacaatcgcgtgtgttttcaactga

SEQ ID NO: 144 - DNA, 1014 bp, Ancylostoma ceylanicum
atgggaaacaaaacgcaggtcggctgttacttcaatgcactcacaaaaactctcattttcgaagtgagtcgtataccgtgtggactagacaatcacaatggtaacttgaacacagacagtacaggcggttcagaagagagtcgatacggcaaaggatcagaggaatggggctatgtggacaaaagtgcgtggaaaaagacttgcaagacaggaaaatcacaatctccgattgatctggacatcagccaagctatactggtggattgggaaccattgaaatttcacaattacgacgctagaggtgatatcgtggctgagaacaatggacatacagagctggtgcaaggatttcagtcatggacgaagaggccatatgttacaggtggaaatctgaaaggaagatacaatttgcagcagtttcacttccactgggatggaaatgatcggtttggaagcgaacacacactcgccggattacattatccattggaggtccactttgtacatataaaggagggcctaaacgagaccaatgcacatcatgtggttgggggcgtcgccgtggtggcggttcagttccaaatcgcaccaaaaggagaggcactgttcgatttggagaaagtcacggaggccacaaactcatcagataccaaaggagatgtgccatcatacagccctgggtcattgttaccacctgacactagcactttcttccgatacacaggttctcttacgacgccaccttgcagcgagggagtgatatggacaattctggcttatccaaacctcgtcacagatacccagctgcgcatactccgaaggcatctcaaggaagacgggtcactgctgatcgacaactggcgaacggtacagccgatgaatgggagaaaactatacctgaataagggaactgtaaatcgagaaggaatcgacacgggagagctgtgggacatcacttcaaaagcggtcccagtagtcctaatatgtgtcgtttttatagttgttcttgtgtaa

SEQ ID NO: 145 - DNA, 915 bp, Ancylostoma ceylanicum
atgctctgtttcctcctgctggtacatttcttggaagaagtatcaggaagcaaaggatcagaggaatggggctatgtggacaaaagtgcgtggaaaaagacttgcaagacaggaaaatcacaatctccgattgatctggacatcagccaagctatactggtggattgggaaccattgaaatttcacaattacgacgctagaggtgatatcgtggctgagaacaatggacatacagagctggtgcaaggatttcagtcatggacgaagaggccatatgttacaggtggaaatctgaaaggaagatacaatttgcagcagtttcacttccactgggatggaaatgatcggtttggaagcgaacacacactcgccggattacattatccattggaggtccactttgtacatataaaggagggcctaaacgagaccaatgcacatcatgtggttgggggcgtcgccgtggtggcggttcagttccaaatcgcaccaaaaggagaggcactgttcgatttggagaaagtcacggaggccacaaactcatcagataccaaaggagatgtgccatcatacagccctgggtcattgttaccacctgacactagcactttcttccgatacacaggttctcttacgacgccaccttgcagcgagggagtgatatggacaattctggcttatccaaacctcgtcacagatacccagctgcgcatactccgaaggcatctcaaggaagacgggtcactgctgatcgacaactggcgaacggtacagccgatgaatgggagaaaactatacctgaataagggaactgtaaatcgagaaggaatcgacacgggagagctgtgggacatcacttcaaaagcggtcccagtagtcctaatatgtgtcgtttttatagttgttcttgtgtaa

SEQ ID NO: 146 - DNA, 1071 bp, Ancylostoma ceylanicum
atgtcgctcgactacttgtacaacctacaagtacagcagtttgctcagcaactttatgcgaccaacctgctgattcctcagattcaacctctgaacgaagtatggcaatactacaatccacatgcacgttataatcgcctcaacgtcgcatatgaaaacatggtgcaccacgcagtccaaaaagttttcctctgcttggcttccggcaaaggatcagaggaatggggctatgtggacaaaagtgcgtggaaaaagacttgcaagacaggaaaatcacaatctccgattgatctggacatcagccaagctatactggtggattgggaaccattgaaatttcacaattacgacgctagaggtgatatcgtggctgagaacaatggacatacagagctggtgcaaggatttcagtcatggacgaagaggccatatgttacaggtggaaatctgaaaggaagatacaatttgcagcagtttcacttccactgggatggaaatgatcggtttggaagcgaacacacactcgccggattacattatccattggaggtccactttgtacatataaaggagggcctaaacgagaccaatgcacatcatgtggttgggggcgtcgccgtggtggcggttcagttccaaatcgcaccaaaaggagaggcactgttcgatttggagaaagtcacggaggccacaaactcatcagataccaaaggagatgtgccatcatacagccctgggtcattgttaccacctgacactagcactttcttccgatacacaggttctcttacgacgccaccttgcagcgagggagtgatatggacaattctggcttatccaaacctcgtcacagatacccagctgcgcatactccgaaggcatctcaaggaagacgggtcactgctgatcgacaactggcgaacggtacagccgatgaatgggagaaaactatacctgaataagggaactgtaaatcgagaaggaatcgacacgggagagctgtgggacatcacttcaaaagcggtcccagtagtcctaatatgtgtcgtttttatagttgttcttgtgtaa

SEQ ID NO: 147 - DNA, 291 bp, Ancylostoma ceylanicum
atgattctcttcgctgccttgcttgtgttggcattcattcttcttcaaccgatcacctcttccgggaagattgaggaatcaccgaactgcaccgaaataatggggaaagatcagtgtccgaaagaagtccgagaacccttgtttgctaaattaaaggagacaaagggaaatatgacatacaactgcacacttgaagaggtatccagtgttacagctagcttcggtgatcctacagcgtatcttgtcctctatacgattgacaatctgaatcaaactgtttataaagagtaa

SEQ ID NO: 148 - DNA, 417 bp, Ancylostoma ceylanicum
atgattctcttcgctgccttgcttgtgttggcattcattcttcttcaaccgatcacctcttccgggaagattgaggaatcaccgaactgcaccgaaataatggggaaagatcagtgtccgaaagaagtccgagaacccttgtttgctaaattaaaggagacaaagggaaatatgacatacaactgcacacttgaagaggtatccagtgttacagctagcttcggtgatcctacagcgtatcttgtcctctatacgattgacaatctgaatcaaactgtttataaagagagcaatcccggatttataggaagcgataggcaaaatcctttgaaagatctcaacgtcactaatttcataacgaacgctaccatagcatggaaagatcaattggataaggttcagttatcttttccttga

SEQ ID NO: 149 - DNA, 513 bp, Ancylostoma ceylanicum
atgaccagtttggagagatctctcgttatctctttgtgtttaatcggattcctctataaaactaagctacacactattgtacagcatcactcaccaatgattctcttcgctgccttgcttgtgttggcattcattcttcttcaaccgatcacctcttccgggaagattgaggaatcaccgaactgcaccgaaataatggggaaagatcagtgtccgaaagaagtccgagaacccttgtttgctaaattaaaggagacaaagggaaatatgacatacaactgcacacttgaagaggtatccagtgttacagctagcttcggtgatcctacagcgtatcttgtcctctatacgattgacaatctgaatcaaactgtttataaagagagcaatcccggatttataggaagcgataggcaaaatcctttgaaagatctcaacgtcactaatttcataacgaacgctaccatagcatggaaagatcaattggataaggttcagttatcttttccttga

SEQ ID NO: 150 - DNA, 471 bp, Ancylostoma ceylanicum
atgattctcttcgctgccttgcttgtgttggcattcattcttcttcaaccgatcacctcttccgggaagattgaggaatcaccgaactgcaccgaaataatggggaaagatcagtgtccgaaagaagtccgagaacccttgtttgctaaattaaaggagacaaagggaaatatgacatacaactgcacacttgaagaggtatccagtgttacagctagcttcggtgatcctacagcgtatcttgtcctctatacgattgacaatctgaatcaaactgtttataaagagagcaatcccggatttataggaagcgataggcaaaatcctttgaaagatctcaacgtcactaatttcataacgaacgctaccatagcatggaaagatcaattggataagatgggaaacaaaacgcaggtcggctgttacttcaatggtagatacatttacgagctcttctgcgcttttgcctga

SEQ ID NO: 151 - DNA, 498 bp, Ancylostoma ceylanicum
atgaccagtttggagagttctctcattatctcattgtgtttgaccggattcctctataaaaggaagccacaaacgattgcacagcaccactcaccaatgtttctcttcgctgcctcgcttgtgttggcattcattcttctccaaccgaccacctcttcggggaacaatgagcaatcactgaactgctccgtactggcaccatatgaatgcccgaaggaagtcaaagagcccttgtttgctaaacttgaggagattataggaaatctgacatataactgtacacttgaagacgtatcgagtgttactgcaaatttcggtaaatttgatgagtacactgtcctctacgatccgattgacaatctgaaccaaactgtttataaagagaataacaccagatggcccacgcataggcaagaggttctaggtggactcaacgtaactaatttcatcaacaacgctaccaaagcatgggaaaaagaattggaagaggttcagtga

SEQ ID NO: 152 - DNA, 564 bp, Ancylostoma ceylanicum
atgaccagtttggagagttctctcattatctcattgtgtttgaccggattcctctataaaaggaagccacaaacgattgcacagcaccactcaccaatgtttctcttcgctgcctcgcttgtgttggcattcattcttctccaaccgaccacctcttcggggaacaatgagcaatcactgaactgctccgtactggcaccatatgaatgcccgaaggaagtcaaagagcccttgtttgctaaacttgaggagattataggaaatctgacatataactgtacacttgaagacgtatcgagtgttactgcaaatttcggtaaatttgatgagtacactgtcctctacgatccgattgacaatctgaaccaaactgtttataaagagaataacaccagatggcccacgcataggcaagaggttctaggtggactcaacgtaactaatttcatcaacaacgctaccaaagcatgggaaaaagaattggaagagatgagaaacaaaacgcaggtcggctgttacctttacggtggatacgttcccatactcgtttgtgcgttcacctga

SEQ ID NO: 153 - DNA, 582 bp, Ancylostoma ceylanicum
atgaccagtttggagagttctctcattatctcattgtgtttgaccggattcctctataaaaggaagccacaaacgattgcacagcaccactcaccaatgtttctcttcgctgcctcgcttgtgttggcattcattcttctccaaccgaccacctcttcggggaacaatgagcaatcactgaactgctccgtactggcaccatatgaatgcccgaaggaagtcaaagagcccttgtttgctaaacttgaggagattataggaaatctgacatataactgtacacttgaagacgtatcgagtgttactgcaaatttcggtaaatttgatgagtacactgtcctctacgatccgattgacaatctgaaccaaactgtttataaagagaataacaccagatggcccacgcataggcaagaggttctaggtggactcaacgtaactaatttcatcaacaacgctaccaaagcatgggaaaaagaattggaagagcttaccaatcagttacagatgagaaacaaaacgcaggtcggctgttacctttacggtggatacgttcccatactcgtttgtgcgttcacctga

SEQ ID NO: 154 - DNA, 468 bp, Ancylostoma ceylanicum
atgtttctcttcgctgcctcgcttgtgttggcattcattcttctccaaccgaccacctcttcggggaacaatgagcaatcactgaactgctccgtactggcaccatatgaatgcccgaaggaagtcaaagagcccttgtttgctaaacttgaggagattataggaaatctgacatataactgtacacttgaagacgtatcgagtgttactgcaaatttcggtaaatttgatgagtacactgtcctctacgatccgattgacaatctgaaccaaactgtttataaagagaataacaccagatggcccacgcataggcaagaggttctaggtggactcaacgtaactaatttcatcaacaacgctaccaaagcatgggaaaaagaattggaagagatgagaaacaaaacgcaggtcggctgttacctttacggtggatacgttcccatactcgtttgtgcgttcacctga

SEQ ID NO: 155 - DNA, 435 bp, Ancylostoma ceylanicum
atgatgttctctgctggtctccttgtggccttctgtctattttcgattaccacacaagaaaaatgtgacaatactaatacgaaatttatgtacgttcctttagatgaggaagtcagaagccatttgaccacgacactttcggcagtcagttttcaaactaggtttaatactatgattaatttttcatatgattgcgagctggaagatgctgctaacctagccgacatggatgagaatgcagtgcgtcaagcgttcccaaatttgtcattcacaatgaagaaattcgagaggccatacgaagtcggaaaagacgccttcatgaaagaagctgctcaagagatgtccaaggagttgggtgggaaaagcaagttcggctgcatgtactctgagctggaagacgataagaaataccaacttatttgcctttttgcctaa

SEQ ID NO: 156 - DNA, 432 bp, Ancylostoma ceylanicum
atgttctctgctggtctccttgtggccttctgtctattttcgattaccacacaagaaaaatgtgacaatactaatacgaaatttatgtacgttcctttagatgaggaagtcagaagccatttgaccacgacactttcggcagtcagttttcaaactaggtttaatactatgattaatttttcatatgattgcgagctggaagatgctgctaacctagccgacatggatgagaatgcagtgcgtcaagcgttcccaaatttgtcattcacaatgaagaaattcgagaggccatacgaagtcggaaaagacgccttcatgaaagaagctgctcaagagatgtccaaggagttgggtgggaaaagcaagttcggctgcatgtactctgagctggaagacgataagaaataccaacttatttgcctttttgcctaa

SEQ ID NO: 157 - DNA, 354 bp, Ancylostoma ceylanicum
atgttctttgcggtgttttgtcttctggtggctttcgtcgttcaagggagcgccgattgtggcaaactcgcggcagataagcgtagtcagcttgaagcggcattgaaggggaaagcgacttacgactgcagcattgagaccgaggctgaccagcttctcactacaataaaagacgggacgtggtggaagtacactgttgttgtttacgaaagtactaaacccgacgacctatttaatagagctgttgaatcgtggaaggatcagattgctgaattggaggccggtgcgttcttcggctgtaacacctcagaagaagatgcaaagtacaggattgtatgccttttcatgtcgtaa

SEQ ID NO: 158 - DNA, 447 bp, Ancylostoma ceylanicum
atggctgccatcattcgaactctattttgggccgttttcgttcttccgtgggtttccaacgtattctcttcgcgtgttccgaaatgttctgaatcaaagagaaaaatgctgtcgtatgacgtacggaaactcatatacgaagagatttccaagcgggtaccgaaacgtccgaagtattcatgttatctggaagaagacgccgctcttctgatatatgaccctgacagcatcagaccagatataggtcaaggagaaaaggagctaagctataaaggccgttggcgatccagcttcatagaagatgtggtgaagcggtggacactgacgctaaaggagatgagacgtttgcagaagataggctgtttctacaaagctcccaaacgacgcagagggactgctgagctggcttgtattttcagattacgcgtgctccaagttggtaaatag

SEQ ID NO: 159 - DNA, 672 bp, Ancylostoma ceylanicum
atggctgccatcattcgaactctattttgggccgttttcgttcttccgtgggtttccaacgtattctcttcgcgtgttccgaaatgttctgaatcaaagagaaaaatgctgtcgtatgacgtacggaaactcatatacgaagagatttccaagcgggtaccgaaacgtccgaagtattcatgttatctggaagaagacgccgctcttctgatatatgaccctgacagcatcagaccagatataggtcaaggagaaaaggagctaagctataaaggccgttggcgatccagcttcatagaagatgtggtgaagcggtggacactgacgctaaaggagatgagacgtttgcagaagataggctgtttctacaaagctcccaaacgacgcagagggactgctgagctggcttgtattttcagattacgcgtgctccaagttgagaggatccttgctcgagcggcgcggtcgcgctgcgttattttcgaggccgcagacgggtcactgccactgacgcccactgtatgtaaattcgtccaaggtttgagtgcagccacagctcgattacaggggattcagaaacaagtcggtgttggcctattcctacgtggaaggcgcaacggtgaatctgacaaatcgcgcacgttctatcctgtcagtcgcagtgatatttag

SEQ ID NO: 160 - DNA, 471 bp, Ancylostoma ceylanicum
atgagatgttctccaaccttccactcggagatagctatgtggtttgcacttactagtcttgtgtcagtaatagcgctttcatacggtgtaccagagtgtcctggattgggcgaccacactatggagcaagatgtgaaagatgacttgataccgaaagttcttcgttattcactggaccaggaagtcgccagcatatcatcggtatacgagtgcaatctggaaaaaattgctggcgaaattctagcagatccttacaaacgaatacagttcctgccagatattggaatctatccactcctttactacattgaagaaagaggtgaagacaacgtaaggctcatgacacatgcagcccttcaaaactggttgaagaatcttaaaaatttgcattacttcaactttggatgcaattatagattcgagcacggaatgcacaattacttgtgccttttcagaactgaagcagaataa

SEQ ID NO: 161 - DNA, 423 bp, Ancylostoma ceylanicum
atgttccagcttgtgtcagtgacagcactttcatacggtgtaccagagtgtcctggattgggcgagcacactatgcagcaagatgtgaaagatgacttgataccgaaagttcttcgttattcaccagaccaggacgtcgccagcttgtcatcggtgtacgactgcaatctggaaaaaatggctgccgaggtcctagcagatccttacaagccaataaaatttttcgagaatatcggaatctatccactcgtttataatattgaagaacgaggtgaagacaacgtgaggctcatgacacatgcagcccttcaatactggaagaaataccttgaaaatttgcattacttcaactttggatgcaattacatatatgagcacgaaatgcacaagtatttgtgcctttttagacatgaggcagagtaa

SEQ ID NO: 162 - DNA, 435 bp, Ancylostoma ceylanicum
atgtggtttgcacttactattcttgtgtcagtgacagcactttcatacggtgtaccagagtgtcctggattgggcgagcacactatgcagcaagatgtgaaagatgacttgataccgaaagttcttcgttattcaccagaccaggacgtcgccagcttgtcatcggtgtacgactgcaatctggaaaaaatggctgccgaggtcctagcagatccttacaagccaataaaatttttcgagaatatcggaatctatccactcgtttataatattgaagaacgaggtgaagacaacgtgaggctcatgacacatgcagcccttcaatactggaagaaataccttgaaaatttgcattacttcaactttggatgcaattacatatatgagcacgaaatgcacaagtatttgtgcctttttagacatgaggcagagtaa

SEQ ID NO: 163 - DNA, 381 bp, Ancylostoma ceylanicum
atgtggttcgcatttactattcttggttcggtaatagtgctctcacgcgctgtaccaaaatgtcctgaattgggcgagtatactatgcagcaggatgtaaaagatcacattgtaccgaaagtactccttcattcgccaggaaaggatatcactgacgtattctcggtgtacgattgctatctggaaaaaatggctggcgagattttgaaggatccacacaagccaataaagttccttgaaagtattggaatctatccactcgtttactccatgtatgtgctccaagcagtatattctcttcttgcattagtactaaccaaagatagcttaatcaacgttacattacatcgtttagtgacggaaagggtgagaccaacgtga

SEQ ID NO: 164 - DNA, 438 bp, Ancylostoma ceylanicum
atgtggttcacactttgtattcttgtgtcagtaatagcgctttcacgcggtgtaccacagtgtactggattgggcaagtacactatgcagagcgatgtgaaggatcacgtagtacagagagtactcctttattcaccaggaaaggagatcgcgagcatatcatcggtgtatgactgcgatctggaaaaaatggctggcgagattctagatgatcctcacaagcctatcgcattcctcaaagatattggaatctatccactcatttactctattgaaggacgaggtgaagacaacgtaaggctcatgacacatgcagccctccatacctggaaggaatacattgaaaagatccctttcttcacttttggatgcaattataggaaacaatatggcgacaggcactactatttgtgccttcttagacataaagcagaataa

SEQ ID NO: 165 - DNA, 435 bp, Ancylostoma ceylanicum
atgtggttcgcacttactattgttgtgtcagtaatagcgctttcacacggcgtgccccaatgtaccgaattgggagagtacgctatgcagcgcgatgtgaaagatgacttaataccaaaaattcttcgatattcgccgggccaggatatcgcgagcgtatcctcggtgtacgactgcgatctggagaaaatggctagcgatctcttaacgaagacttacaagacattggacttcctcaagcctattggaatctacccactcatttactcaattgacggaagagatgaaaacaatgtaaggctcatgacacatgcagcccttcagacatggaagaattatattgaagatatacccttcctcacttttggatgcaattataggtacgagaacggaatgcacaattatttatgcctccttagacataaagcagaataa

SEQ ID NO: 166 - DNA, 492 bp, Ancylostoma ceylanicum
atggccctgtggtacgctgctcttatccttctgtcagtggcagcttctggtggcgcacaagggcttgccccggcaggcatccaagcgacacccgactgttctcagttgggaaaatatgcctttcaccgcaaagatttgagaacggaactagcagcagaactccttgttcgtcaacctactagaggaggagtaagcgcgaagatgacgtatctatgcgctctggaaggaatggcaggactgattctggaaaacccacacaagccggtaacatgccctgtcgatctcgggatatttccacttctttttgagaaagatggaaaagatgtcagtgccaatttgatgactaaggaagcaactgctgattttgtgaagcatatgcctgcttttggatctgcaacaggcttcggatgcaactacgtggaggaaaatggcaggcacaagttcttgtgcctgttcaagttaactaggaagattgtagtacgcagaagttga

SEQ ID NO: 167 - DNA, 519 bp, Ancylostoma ceylanicum
atgaaaacccccataactcatttggtaatggccctgtggtacgctgctcttatccttctgtcagtggcagcttctggtggcgcacaagggcttgccccggcaggcatccaagcgacacccgactgttctcagttgggaaaatatgcctttcaccgcaaagatttgagaacggaactagcagcagaactccttgttcgtcaacctactagaggaggagtaagcgcgaagatgacgtatctatgcgctctggaaggaatggcaggactgattctggaaaacccacacaagccggtaacatgccctgtcgatctcgggatatttccacttctttttgagaaagatggaaaagatgtcagtgccaatttgatgactaaggaagcaactgctgattttgtgaagcatatgcctgcttttggatctgcaacaggcttcggatgcaactacgtggaggaaaatggcaggcacaagttcttgtgcctgttcaagttaactaggaagattgtagtacgcagaagttga

SEQ ID NO: 168 - DNA, 438 bp, Ancylostoma ceylanicum
atggtagatgctctatcaatccactcggtgatggaacagtgttacgttcttgctatttttttatcagtggtagcactttcggagagcatccaacagcaacccgactgctcccagctgcgtcagtacgcaatgcctcgtaatgtgagactcgatttggcaactaaggttcttgcttacgaaaacaaaagagacgccagcgtgtcggcggtatacttgtgcgctctggaaggattggctggactgattttggagaatccacacaagccgctgacatgtccacactcccttggaatgcactcgctcgtttttgagatcgaagaagaaccagatatcaacgtgggcgttatgagtcaagcagctattaatgtatggaaggatcacattcctcatgtgagaggcagcctttgcatctttaatttttcaaagaaatttctctaa

SEQ ID NO: 169 - DNA, 408 bp, Ancylostoma ceylanicum
atggaacagtgttacgttcttgctatttttttatcagtggtagcactttcggagagcatccaacagcaacccgactgctcccagctgcgtcagtacgcaatgcctcgtaatgtgagactcgatttggcaactaaggttcttgcttacgaaaacaaaagagacgccagcgtgtcggcggtatacttgtgcgctctggaaggattggctggactgattttggagaatccacacaagccgctgacatgtccacactcccttggaatgcactcgctcgtttttgagatcgaagaagaaccagatatcaacgtgggcgttatgagtcaagcagctattaatgtatggaaggatcacattcctcatgtgagaggcagcctttgcatctttaatttttcaaagaaatttctctaa

SEQ ID NO: 170 - DNA, 444 bp, Ancylostoma ceylanicum
atggtagatgctctatcaatccactcggtgatggaacagtgttacgttcttgctatttttttatcagtggtagcactttcggagagcatccaacagcaacccgactgctcccagctgcgtcagtacgcaatgcctcgtaatgtgagactcgatttggcaactaaggttcttgcttacgaaaacaaaagagacgccagcgtgtcggcggtatacttgtgcgctctggaaggattggctggactgattttggagaatccacacaagccgctgacatgtccacactcccttggaatgcactcgctcgtttttgagatcgaagaagaaccagatatcaacgtgggcgttatgagtcaagcagctattaatgtatggaaggatcacattcctcataaagctcttcacatgggacgcgaatacgaaatcaacagcagatactgcaggtga

SEQ ID NO: 171 - DNA, 474 bp, Ancylostoma ceylanicum
atggtagatgctctatcaatccactcggtgatggaacagtgttacgttcttgctatttttttatcagtggtagcactttcggagagcatccaacagcaacccgactgctcccagctgcgtcagtacgcaatgcctcgtaatgtgagactcgatttggcaactaaggttcttgcttacgaaaacaaaagagacgccagcgtgtcggcggtatacttgtgcgctctggaaggattggctggactgattttggagaatccacacaagccgctgacatgtccacactcccttggaatgcactcgctcgtttttgagatcgaagaagaaccagatatcaacgtgggcgttatgagtcaagcagctattaatgtatggaaggatcacattcctcatgtgagattcggatctttcggatgcaattacagaaaggagcatggaaagcacaagtatttatgtctgctgaaaattgtcaactaa

SEQ ID NO: 172 - DNA, 444 bp, Ancylostoma ceylanicum
atggaacagtgttacgttcttgctatttttttatcagtggtagcactttcggagagcatccaacagcaacccgactgctcccagctgcgtcagtacgcaatgcctcgtaatgtgagactcgatttggcaactaaggttcttgcttacgaaaacaaaagagacgccagcgtgtcggcggtatacttgtgcgctctggaaggattggctggactgattttggagaatccacacaagccgctgacatgtccacactcccttggaatgcactcgctcgtttttgagatcgaagaagaaccagatatcaacgtgggcgttatgagtcaagcagctattaatgtatggaaggatcacattcctcatgtgagattcggatctttcggatgcaattacagaaaggagcatggaaagcacaagtatttatgtctgctgaaaattgtcaactaa

SEQ ID NO: 173 - DNA, 324 bp, Ancylostoma ceylanicum
atgttcgcatcggcaattgtcaaccgggttcccagagaagatgtgaacgaccctctggtttatcagtgttacttggaaggattggcaggtttgatcctggagaaccccggcaaaccctctcagctggactgtcctttctctcttgcaactctcccactcgatttcgatcttataaagcaacatggtttcaacatagaaatcatgatcggagcaggtattgcgaaatgggaggagtttttgtttcgaatgtctgctgcaaacagttttggatgcaactacgtaacagaggatcgtagatacagatttttatgtctttttgcgtaa

SEQ ID NO: 174 - DNA, 228 bp, Ancylostoma ceylanicum
atgcagcgcgatgtgaaagatgacttagtaccgaatgtacttctctataagcctaagaatgatgacggcgcatcagtggaatataaatgcgatctggagaaaatggctggtgagattttagcggatcctggaaagtcactaaccgaggccgtctctctcaagatgcatcccctcgtgttcgctatgtacgtggcacttccagtttgttctcttgcctcacgcacctaa

SEQ ID NO: 175 - DNA, 516 bp, Ancylostoma ceylanicum
atggctcgatggtacgcactcattttccttgtctcggtagaagcgttcatacccgattcttatgatatacccgattgccctcatttgggtaaatacacaatggatcctgatgtgaaaactgatctagtaacgaaggtattcgaaaatggacctattaaggacgacttctcccttatggcgtacgactgcgaactggagaaaaaggctgggcaaattttagaggatcctcacaaatcactagacgaagtacagtctcttggaatgcatccgctcgtttatgaaatgtacgtgatactttcggtttattaccttccttcattagggctgcataaaaccagtttgataagaatagcacagtttagtgaagaagaacctgatatccccgtaaccattatgacagaagcagccattcagacatggaagccccacattccttatgtgtcattcgcaacatcttttggctgcaattacaggaacgagcacgggaaacacaagtatttgtgtcttctcaaatga

SEQ ID NO: 176 - DNA, 276 bp, Ancylostoma ceylanicum
atggaacaacaacctcgtactctatacacctgctcgctggaagctctagctgccaaaatatgggatgactccagagccgagagagagaaaatcattaagcacaacatcaaagagttcaaatacaaaggagaaacaactgacgacttcgtcacacttgcggctgaccagtggagagagagattccatagaaagaaagatgtgaagaagagttacggaggatgtttttatggagagaaggacaatggcaaatccaaagctgtctgcctttttatttga

SEQ ID NO: 177 - DNA, 426 bp, Ancylostoma ceylanicum
atgacacctcctactgttctgctgcttgctttggtctgtcttctttcaatgccacaattgtccaatgcacatgagaaagactgcaaagaaacaaagggacgctacactcaggagcagcgagacaatctcttcgaggcagttgttaaggttatggatcaagaacctcgtactctatacacatgctcgctggaagctctagctgccaaaatatgggatgactccggagccgagagggagaaactcatcaagcacaacatcaaagagttcaaatacaaaggagaaacaagtgccgacttcgtcacagttgcggctaacaagtggaaggacagatttcatagaaagaaggaagtaaagaagatatacggaggttgtttttatggggagaaggacaatggcaaatccaaagctgtctgcctttttatttga

SEQ ID NO: 178 - DNA, 519 bp, Ancylostoma ceylanicum
atgaggtcctcgatactccgctgcatcaatttttgcctggccggagcagatccactgtgccacgccaacatgggtttctttagcggcttgatctttgcggcactatctctccttcacattacatcttctgcaattatgaaagatgaagttcccgagtgtgaagagctcgagtggaacgcgcttagaatggaacaacgggatactttggtcgtccgacttaatgaagcgttgaagaatgtcgacgttacgaaatactcctgcaatctggagcgaatcgccaaagtccttgcggatatagcacagcgcccattatggcgtgatgcgcaaattttcacacatgaagagccaacttctaccgattatggccaattagtccgaaacgccatacaggagtggtcctcagatcttgagaaaattcgcgatttgaacatttttggctgcaattacaaggagaaaaacggcaaaaaagtacttgtttgtgttgttgaatcggaaaagagattgataatggaagtatga

SEQ ID NO: 179 - DNA, 228 bp, Ancylostoma ceylanicum
atggccaaattttctgtgttcatacctggttacaatgatcaaaaccggtacgatacggtagaattcagacacgaagagcccacatccactggcttcgagcgtttggtccgaaaatccatacacagttggtctaaggatttcaagaaaataaatggttcgcgaaaaatcggctgcaactacgatacggtcaatggtaatgaggcgcttgtctgtcttgttggtcagtga

SEQ ID NO: 180 - DNA, 375 bp, Ancylostoma ceylanicum
atgagactattttttatcccacttgaatcccttgtcagaaactgtttttgtggctgtattgctcaggaattgcggggggctgaatttggcggcaccaaaaatctgagtccacacatcttccaggaatactattgcgccctagaaaaaatggccaaattttctgtgttcatacctggttacaatgatcaaaaccggtacgatacggtagaattcagacacgaagagcccacatccactggcttcgagcgtttggtccgaaaatccatacacagttggtctaaggatttcaagaaaataaatggttcgcgaaaaatcggctgcaactacgatacggtcaatggtaatgaggcgcttgtctgtcttgttggtcagtga

SEQ ID NO: 181 - DNA, 402 bp, Ancylostoma ceylanicum
atgagactattttttatcccacttgaatcccttgtcagaaactgtttttgtggctgtattgctcaggaattgcggggggctgaatttggcggcaccaaaaatctgatagctcaagctcttactgatagaacaggtccacacatcttccaggaatactattgcgccctagaaaaaatggccaaattttctgtgttcatacctggttacaatgatcaaaaccggtacgatacggtagaattcagacacgaagagcccacatccactggcttcgagcgtttggtccgaaaatccatacacagttggtctaaggatttcaagaaaataaatggttcgcgaaaaatcggctgcaactacgatacggtcaatggtaatgaggcgcttgtctgtcttgttggtcagtga

SEQ ID NO: 182 - DNA, 297 bp, Ancylostoma ceylanicum
atggaattcaagctcgttttcctaaatcgtccacacatcttccaggaatactattgcgccctagaaaaaatggccaaattttctgtgttcatacctggttacaatgatcaaaaccggtacgatacggtagaattcagacacgaagagcccacatccactggcttcgagcgtttggtccgaaaatccatacacagttggtctaaggatttcaagaaaataaatggttcgcgaaaaatcggctgcaactacgatacggtcaatggtaatgaggcgcttgtctgtcttgttggtcagtga

SEQ ID NO: 183 - DNA, 450 bp, Ancylostoma ceylanicum
atgttcaccgcttgcttgtttctggtgttcttctgccttcttccgatgaccagcgcagcgaagtcatccgagaataaagattgtaagggagaggtaaaagatccttgtcgagaggatataaggaccctactgatcgcgaatataacaaatctctcaacacagaaattggtatatgattgcgaccttgaaagagcaattggtgcgaaacttgatttcccagaaatatggggggaagatatatacgatgacttcaaaaatgctcctcggacacaatatgaagagagaattgaaacttcaaatcctcttaaaccggaactcttcattaataaagctattgcaaattggacaactgaattggagaagatgacaggggaaacagacttcggctgtaacttccgagatgaccatggagagaacagagttgcatgccttttctatcatgactggtaa

SEQ ID NO: 184 - DNA, 486 bp, Ancylostoma ceylanicum
atgattcagggacgctgcatcatccgttccgcagtgatgttcaccgcttgcttgtttctggtgttcttctgccttcttccgatgaccagcgcagcgaagtcatccgagaataaagattgtaagggagaggtaaaagatccttgtcgagaggatataaggaccctactgatcgcgaatataacaaatctctcaacacagaaattggtatatgattgcgaccttgaaagagcaattggtgcgaaacttgatttcccagaaatatggggggaagatatatacgatgacttcaaaaatgctcctcggacacaatatgaagagagaattgaaacttcaaatcctcttaaaccggaactcttcattaataaagctattgcaaattggacaactgaattggagaagatgacaggggaaacagacttcggctgtaacttccgagatgaccatggagagaacagagttgcatgccttttctatcatgactggtaa

SEQ ID NO: 185 - DNA, 447 bp, Ancylostoma ceylanicum
ctattcttcccttcaacactggctaatactcgaaaaggatgcactggtgttctgatgacacgatgcaagggacatgatccagctctagcagtgatcaggggccccatatcagctgaactttttagccaactcccgggaactgataagatgccatacaactgcgaattagaactgagagcaaaggacgctagtggaagatccaatccacacgattatctttactctaagtatccaggggagcacagcttgtattttgaatatgaaggtgccgactcagatgacttcttccacaacgcagtgaagagttggaacgatggatactacaaaacgaggagtggccttcctgttcaactctaccaaccatacggctttggctgcgccggcgttctgaatggacagaaaagcaaagttgcttgcgtcttcggagctagtttgaacaagaactaa

SEQ ID NO: 186 - DNA, 498 bp, Ancylostoma ceylanicum
atgatcactcacagcgctgtagcgacaatggttctgtttgtcaccttggccttggtggtattctgctcttcatcattggcaagtgctcccaaagggtatgaaagtgctctgaagggctgcgacggacatgatgcgactctagcggtgatccgaggcccaatttctctcgaacttttcaagcaacatcccgaacttcataatatggattattcctgcaaattagaaaaaagagtacatgaggcgattggacaatccaatcctcaggactatctcgagagaaagtacgaaggagaatataactggtatttcgaatacgaagagcccaagagtgaccagtcagatgatttttttaagaatgcggtgaagagttgggaggagagatataatacggtaaaccatgttggtattccagtctaccaaccctatggattcggttgcgctggcgttctgaagggaccgaatagcaaagttgcttgcgttttcggagctaaattgtag

SEQ ID NO: 187 - DNA, 471 bp, Ancylostoma ceylanicum
atggttctgtttgtcaccttggccttggtggtattctgctcttcatcattggcaagtgctcccaaagggtatgaaagtgctctgaagggctgcgacggacatgatgcgactctagcggtgatccgaggcccaatttctctcgaacttttcaagcaacatcccgaacttcataatatggattattcctgcaaattagaaaaaagagtacatgaggcgattggacaatccaatcctcaggactatctcgagagaaagtacgaaggagaatataactggtatttcgaatacgaagagcccaagagtgaccagtcagatgatttttttaagaatgcggtgaagagttgggaggagagatataatacggtaaaccatgttggtattccagtctaccaaccctatggattcggttgcgctggcgttctgaagggaccgaatagcaaagttgcttgcgttttcggagctaaattgtag

SEQ ID NO: 188 - DNA, 501 bp, Ancylostoma ceylanicum
atgactgccgcatgggtgatcctcactgttacgtctgtattgtttgctgcaagagaagtcagctcccacaatgatgaatgttcaaacggctggacgagttggaaacggaacacggagttgggttacgaatacaagatgatctgctggaaggattatgtaagtgaggatgttgcactgaagcgttgcagggaagaacgtgcagatttggcttccatccacagcaaagatgaaaatgattttgtgactgatgtggcttatggagttgggatgagtttcaaatctggactcaaagtgtggatcggtttgcacaaaaacaagcacggtggatgggagtggtcagatggcacagcgtacgattataagaattgggatgacaaacaacccgataactataacggtcatgaaacggaatcgccagaagattgtactcaagtgagattcattggattgtactcaaatgggaatcatttctcaaatctacagttccggaaaatggaatga

SEQ ID NO: 189 - DNA, 381 bp, Ancylostoma ceylanicum
atggggtgccaagaacacggagcgcatttggcttccatccacagcagtgacgaaaaccgttttgtcagagatctagcggcaaatgcatcccgaagccatgaggctttgcatacatggatcggttttcacaaagactgtcacggtgattggaaatggtcggatgaaacagaaacggactatctgaactggtacactaaccagcctgataattataacggccatgcaacggaatctccggaaaactgtgttcatatatacaccggaggaacatggaacgatctcaaatgtaaaggcgcggcctgtgacgtgacgcaatttgtgtgcaagaggcgtaacaccgtggcgacaacaaggaaacccgtggaaatggaaaaactctga

SEQ ID NO: 190 - DNA, 699 bp, Ancylostoma ceylanicum
atggctgaacaaaagctgtttcagattcaatacgatcctaacaaggtgacgttcctacaagctcgaatgaaatgtgaggaaatggatggcgaattggcatccatacacagcaatgaggaagttgaattcctgaaatgtgttttgcgatcgaactcaaccctgatggaggactcctggatagggttggtctacgatgtcactaacaatgatgcggataataaatgggtggatggaagtcgatttaacttctccaactacgcagatggcgagccaagatacgtgggaatgggagaattctgtgtacagatgattaccaacggagacgaatttggtaaatggaaagttgtaaactgcagagatagtacctacgtctacgtgtgcaaaaaacgcaaggaagatcccggaaatgatccaaatgagccacgaactacatcaaagataggcagctctgaggaagaccccaacaataagccacgaccttcatcaaagcgagtcaagacgcgaagaccaagacaaacaaaaccaacaccaacaccagaaatgttcctaccagaagactacacaacaactgaatcataccccgacgctactcaacctccccattgcaatccagctacagcagatccggacgatccctcatgcaaacctatatccgaatacgatcctattgtagaagaaaaaggctgttatccagtgtga

SEQ ID NO: 191 - DNA, 2037 bp, Ancylostoma ceylanicum
atgataggcctgattctgctggtgtacttggctgtgtgtgcgcatgcgctcacaataatcccggaatttcctcacaaacacaaaggtttcagatactcgctcttgtttcaagacacaaaggcagacttcgccacggctaaaaaaatttgtcagagatatggcgcacagttggtatccttccacggcgcggacgaagtggaattcgttaaacaagttgaaagatcaaacttgacttggatggaggatacgtggatgggattgacagtaaccgttactcctactggtttcgtttacaaatgggtggatggaactcgtttcgattttaaaaattttgcgccaggggagccaagacgcttggaaagtggacaatactgtgcccagatcatatacgcaaacgaaaccgaacattttggcaagtggaagatcgtaagctgcagtgatcagctacaaccctacacgtgcaaaaaacctcttgatggtacaagttggggaactccagccccatctgacgaagatgatgattttcctcatagattcaagcaaaatcaatatgcagtagagtatgaccctaacaaagtgaagttcgtggaggctcggataaaatgtcagaatatgaatgcagatttggcatcgttacacagcagagatgaggttgaattcttgaaacgtattatgcaatcaaactcaaccctgatggaggacgcttggataggaatggtctatactatcagcgctacgagcgcggagaagaaatggacagacggctctccttttgactacaaaaattttgcgccgggaatgccaaattctttttcagtgggtgaacattgtggccaggttatgagcgatggagagaacttgggcaagtggaaaactacggactgtagcgacgatgcgcacatctatgtgtgtaaaaaaccctggattccacctagtgtccccagtggagacccgatgttccctcatgtgttcaaagatagcaaattcgggatattcaatgacaaagtaaccttcatacaagctcgtatgaaatgtgaggaaatgggcgcagaactagcatctatacacagcaaaagagagattgagttcctgaaaggtgtcatgcaatctcgctcagtctatatggaggactcgtggatagggatgatccatacagtcacacatactggtgcgacctcccgatgggtggatagtactcctttcgacttcaaaaactttgcaccgaacgagccaaaatatcagaaatatggggacctctgtggtcagatgatgtccaacggtgacgaactttccaaatggagagttgtagactgcaccgatactgcgtacgcttacgtgtgtaaaaaaccgaagaatggcagaggaggtggtcgaggtagaacagtgatacccaataatccagacccaggaagtcaagaagatggtcctacgccacgccctgatccctccaaggacgggttcccttaccggttcaagggtgataaatatgctgtaaactatgacccaaacaaggtcaagtttgtagaggcccgagtacggtgtcaaaatatgaatggagaattagcatccttccacagcaaagatgaaattgatttcgtgaaaagtatcatgcaatcgaactcaaccgtgatggaggacgcctggataggattggtctacgatgtcactgccactggtacgaacaccaaatggttggatggaagtcgatatgacttcaccaactacgcgataggcgagccaaaatacgatgggacgggacagttctgtggacagattgttaccaatggagccgaattctctaaatggaaagttgttgactgcagctcagatgcgtacgtctatgtgtgcaaaaaaaccaagagcgataacaacaatggtggaggtaaaaccaagaaacccaaagtgccccaagtggtaaccccagctccagaaccagaaaatcccacagtggcaacacctccagactcaaaagatgacccatttattcatcagttcgaggatgacaaatacgcggtaagctcttccaaagtaatgtaa

SEQ ID NO: 192 - DNA, 2688 bp, Ancylostoma ceylanicum
atgataggcctgattctgctggtgtacttggctgtgtgtgcgcatgcgctcacaataatcccggaatttcctcacaaacacaaaggtttcagatactcgctcttgtttcaagacacaaaggcagacttcgccacggctaaaaaaatttgtcagagatatggcgcacagttggtatccttccacggcgcggacgaagtggaattcgttaaacaagttgaaagatcaaacttgacttggatggaggatacgtggatgggattgacagtaaccgttactcctactggtttcgtttacaaatgggtggatggaactcgtttcgattttaaaaattttgcgccaggggagccaagacgcttggaaagtggacaatactgtgcccagatcatatacgcaaacgaaaccgaacattttggcaagtggaagatcgtaagctgcagtgatcagctacaaccctacacgtgcaaaaaacctcttgatggtacaagttggggaactccagccccatctgacgaagatgatgattttcctcatagattcaagcaaaatcaatatgcagtagagtatgaccctaacaaagtgaagttcgtggaggctcggataaaatgtcagaatatgaatgcagatttggcatcgttacacagcagagatgaggttgaattcttgaaacgtattatgcaatcaaactcaaccctgatggaggacgcttggataggaatggtctatactatcagcgctacgagcgcggagaagaaatggacagacggctctccttttgactacaaaaattttgcgccgggaatgccaaattctttttcagtgggtgaacattgtggccaggttatgagcgatggagagaacttgggcaagtggaaaactacggactgtagcgacgatgcgcacatctatgtgtgtaaaaaaccctggattccacctagtgtccccagtggagacccgatgttccctcatgtgttcaaagatagcaaattcgggatattcaatgacaaagtaaccttcatacaagctcgtatgaaatgtgaggaaatgggcgcagaactagcatctatacacagcaaaagagagattgagttcctgaaaggtgtcatgcaatctcgctcagtctatatggaggactcgtggatagggatgatccatacagtcacacatactggtgcgacctcccgatgggtggatagtactcctttcgacttcaaaaactttgcaccgaacgagccaaaatatcagaaatatggggacctctgtggtcagatgatgtccaacggtgacgaactttccaaatggagagttgtagactgcaccgatactgcgtacgcttacgtgtgtaaaaaaccgaagaatggcagaggaggtggtcgaggtagaacagtgatacccaataatccagacccaggaagtcaagaagatggtcctacgccacgccctgatccctccaaggacgggttcccttaccggttcaagggtgataaatatgctgtaaactatgacccaaacaaggtcaagtttgtagaggcccgagtacggtgtcaaaatatgaatggagaattagcatccttccacagcaaagatgaaattgatttcgtgaaaagtatcatgcaatcgaactcaaccgtgatggaggacgcctggataggattggtctacgatgtcactgccactggtacgaacaccaaatggttggatggaagtcgatatgacttcaccaactacgcgataggcgagccaaaatacgatgggacgggacagttctgtggacagattgttaccaatggagccgaattctctaaatggaaagttgttgactgcagctcagatgcgtacgtctatgtgtgcaaaaaaaccaagagcgataacaacaatggtggaggtaaaaccaagaaacccaaagtgccccaagtggtaaccccagctccagaaccagaaaatcccacagtggcaacacctccagactcaaaagatgacccatttattcatcagttcgaggatgacaaatacgcgattcaatacgatcctaacaaggtgacgttcctacaagctcgaatgaaatgtgaggaaatggatggcgaattggcatccatacacagcaatgaggaagttgaattcctgaaatgtgttttgcgatcgaactcaaccctgatggaggactcctggatagggttggtctacgatgtcactaacaatgatgcggataataaatgggtggatggaagtcgatttaacttctccaactacgcagatggcgagccaagatacgtgggaatgggagaattctgtgtacagatgattaccaacggagacgaatttggtaaatggaaagttgtaaactgcagagatagtacctacgtctacgtgtgcaaaaaacgcaaggaagatcccggaaatgatccaaatgagccacgaactacatcaaagataggcagctctgaggaagaccccaacaataagccacgaccttcatcaaagcgagtcaagacgcgaagaccaagacaaacaaaaccaacaccaacaccagaaatgttcctaccagaagactacacaacaactgaatcataccccgacgctactcaacctccccattgcaatccagctacagcagatccggacgatccctcatgcaaacctatatccgaatacgatcctattgtagaagaaaaaggctgttatccagtgtga

SEQ ID NO: 193 - DNA, 474 bp, Ancylostoma ceylanicum
atgctcagagtctatatcgtggtgacagccataatagcaacaaccgaagcctgcactggatggcatatgttttatggaaataaacactgctataaggtgttctgcaaagaggttgaatgggaagcagccaagaaacattgcgaagaactcggaggttatctagcttcaattggagatgcagaagaaaataactttgtaggatctctcgcaggtaacatgtatgcgagggtttggatcggatataaacgtactacaccacatcaaagaccattttattgggttgatggttcaaagactggctttgaaagttggagttcaagaacaagcgagccgaacaatgcaagaggcgatgaagactgcacctatatgctcacgtatgcacatttatcaagattggagtggaatgatcactactgcacttttctatcggattatgtatgtgaaagaaatgattgttttgatctccctgaataa

SEQ ID NO: 194 - DNA, 876 bp, Ancylostoma ceylanicum
atggatgacctctggcttgttgtcactattatgatagtcctctttgctacaagtgagggctatctcagaacgcaatgtgatcgatcgacgacgaactgggaacgtttggatgattatgaatacaaggtcttctgtctatcatcatatatctcgttcgcagcagcagagcggcaatgcaaattctatgacgcgcacttggtttccattcatagcatgaaagagaacgattttgtgcacgaactgatagggcccaagttggacagactcatctactcatggattggcttgtaccgagatgacgtgggggccgactggaaatggacggatggctctgaggtggacttcataaattggggctttcatcagccggacaactacaacaaccgtcccgggttcggaccggaaaattgtgctcatatgtacgtcgttcccagattggtgtgggacacctactggaatgacgtcgaatgtgacaaaggagggaacctcttcgtctgcaagagaatgattgatgatgatcgactagaggttgacccaaagcaaattacaatatatcatctgatagggctcaggttggacagacttatatactcatggattggcttgtaccgtgattacgtgggcgacgactggaaatggacggatggctccgaggtggactacttgaattggggctaccatcagccggacaactataacaacattcccgggttcggaccggaaaattgtgctcaaatgtacatcgttcccagattggcgtgggacacctactggaatgacgtcaaatgtgacataggagggcattacttcgtctgcaagagaatgactgatcatcgaccagagtatgtgccacagaaaatggcaaaatatcgctag

SEQ ID NO: 195 - DNA, 561 bp, Ancylostoma ceylanicum
atggatgacctctggcttgttgtcactattatgatagtcctctttgctacaagtgagggctatctcagaacgcaatgtgatcgatcgacgacgaactgggaacgtttggatgattatgaatacaaggtcttctgtctatcatcatatatctcgttcgcagcagcagagcggcaatgcaaattctatgacgcgcacttggtttccattcatagcatgaaagagaacgattttgtgcacgaactgatagggcccaagttggacagactcatctactcatggattggcttgtaccgagatgacgtgggggccgactggaaatggacggatggctctgaggtggacttcataaattggggctttcatcagccggacaactacaacaaccgtcccgggttcggaccggaaaattgtgctcatatgtacgtcgttcccagattggtgtgggacacctactggaatgacgtcgaatgtgacaaaggagggaacctcttcgtctgcaagagaatgattgatgatgatcgactagaggttgacccaaagcaaattacaatatatcgttag

SEQ ID NO: 196 - DNA, 675 bp, Ancylostoma ceylanicum
atgctggcgcagaaggctttttactatttgtgttggtgatctcggtttcatgatatcgaacatttcaaaacaagagattatttaagggtggatttcaccaaaccacattcagttgcttcgtattacctgttctctccggttgctccaatcgttccacgaaatttcagcatgttacgagtgagcatcgcaatgatcgtcatcgctacgacgctagctgatgaccctatgccgtgcactggatggcatacattcttggagaatggacactgctacaggaagttctgcgacttacgatcatggacttccgcaaaggtagtgtgcgagcaacagggaggttacctcgcaacacccagaagttcaagcgaaaacacattcatagcggcactctcggctaattccggaaaggaacattggtactcctatttgggatggacatggtttggggtttacagagacaatgttaaaccaggcactccctggaagttgatagacggaacgattgcaaaatacaataatttcaactatggggaaccaaacaatggttacggagacgagagatgtgtaaacttcaaaaccaatggatataatataaacgaccattggaacgactacctctgcgaaaagccggcattctacgtgtgcgagcgaaatacctgtcatgatgttcctccataa

SEQ ID NO: 197 - DNA, 627 bp, Ancylostoma ceylanicum
atgctggcgcagaaggctttttactatttgtgttggtgggtggatttcaccaaaccacattcagttgcttcgtattacctgttctctccggttgctccaatcgttccacgaaatttcagcatgttacgagtgagcatcgcaatgatcgtcatcgctacgacgctagctgatgaccctatgccgtgcactggatggcatacattcttggagaatggacactgctacaggaagttctgcgacttacgatcatggacttccgcaaaggtagtgtgcgagcaacagggaggttacctcgcaacacccagaagttcaagcgaaaacacattcatagcggcactctcggctaattccggaaaggaacattggtactcctatttgggatggacatggtttggggtttacagagacaatgttaaaccaggcactccctggaagttgatagacggaacgattgcaaaatacaataatttcaactatggggaaccaaacaatggttacggagacgagagatgtgtaaacttcaaaaccaatggatataatataaacgaccattggaacgactacctctgcgaaaagccggcattctacgtgtgcgagcgaaatacctgtcatgatgttcctccataa

SEQ ID NO: 198 - DNA, 426 bp, Ancylostoma ceylanicum
atgcttgcgcctgataagtcgtatctgaagttctgcgacttacgatcatggacttccgcaaaggtagtgtgcgagcaacagggaggttacctcgcaacacccagaagttcaagcgaaaacacattcatagcggcactctcggctaattccggaaaggaacattggtactcctatttgggatggacatggtttggggtttacagagacaatgttaaaccaggcactccctggaagttgatagacggaacgattgcaaaatacaataatttcaactatggggaaccaaacaatggttacggagacgagagatgtgtaaacttcaaaaccaatggatataatataaacgaccattggaacgactacctctgcgaaaagccggcattctacgtgtgcgagcgaaatacctgtcatgatgttcctccataa

SEQ ID NO: 199 - DNA, 426 bp, Ancylostoma ceylanicum
atgctggcgcagaaggctttttactatttgtgttggtgatctcggtttcatgatatcgaacatttcaaaacaagagattatttaagggtggatttcaccaaaccacattcagttgcttcgtattacctgttctctccggttgctccaatcgttccacgaaatttcagcatgttacgagtgagcatcgcaatgatcgtcatcgctacgacgctagctgatgaccctatgccgtgcactggatggcatacattcttggagaatggacactgctacaggcctcatagggcaatttatactagatgcgtgcgactgacgcgcttgcgtctatatgatgaagaacatgggctagtcgcatcgcagccgcacgcgttcacggccttgcgacgggcgcgcgttcttttagttgggaatttcataccgcgttga

SEQ ID NO: 200 - DNA, 2481 bp, Ancylostoma ceylanicum
atgcaaagcggtcctactgcattgtcatatcaatggacggatggaaccaatgtcgattttaaaaactttctggcaggtgaaccaaacttcggaagcgaggaacagtactgcacccagattctgtacgacaaagaattcggcccgaactttggcaagtggagagcagcgaactgcaccgatgaattatacgcctttatgtgcaaaagacctaaaaatcgcaatttgtggaaggaatgcaacccgaatcggtatttttctgacgtcttcaagggaaatgaatacgcggtaatgcataatggtgagaaagtgactttcctacaggctcgaatgcaatgtgaggatttgggcgcacagttagcatccatacacagcaatgaagaagttcagctcttgaaacgtgttatgcaatcgaactcgacactgatggaggacgcttggataggattggtctacaccgtcggcgctaccagtgcgtacaacagatggatagacaactctgccttcgattacaaaaatttcgcaccgggagagccaaatttttctaacgagggagaatactgtggccagattatgaccgaaggggacagcttcaccaaatggaaagttacaaactgtagcgagaatgcgtacaccttcgtgtgtaaaagacctcggacaggcaccggcggtggcccgggtggttcacatggaggtagtgtaactgatagcccttcggtcgttaatcctcccacggatacggatccaaggtttcctcaccagttcaagggaaacaaatatgctataatctacgacccaggaaaagtaaagttcgtgcaggcccgaacgcgatgtgaggatatgggtgcagaattggcatccatacacagcagggaagaggttgaattcctgaaaagtgttatacaatcaaactcaaccctgatggaggacgcttggataggaatggtctatactatcagcgctactagtgcggacaagaaatggatagacaactctccttttgactacaaaaatttcgccccgggagagccaaagtcttttggtgagggagactactgtggccagattataaccaatggagacgccttgtctaaatggagagttgcggactgtagcgaggatgcgtacaccttcgtgtgtaagaaatcctctagtgacaatgggagtggaggcgagggaccaggtggatcaggtggtggaggcacaggaggaggatctggcgaagatccaaacaccaaaccctctccggatacggatccaaggtttcctcacgagttcaagggagacaaatatgctatacaatacgagcctgggaaagtgaagtttgtacaggcccgaacgcagtgtgagaatatgggcgcagagttggcatccatacatagcagacaagaggctgaattcttgaaaggtgtcatgcaatcaaactcaacccttatggaggacgcttggataggaatggtctatactatcagcgctactagtgcgaataagaaatggatagacaactctccttttgactacaaaaattttgctccgggagagccaaagtcttttagtgagggagactactgtggccaaattatgaccgaaggggataacttgtctaaatggaaggttgtggactgtagcgaggaggcgtacaccttcgtgtgtaagaaatcctctaatagcaatgggaatggaggacatggaccaggtggatcaggtggcggaggcaaaggaggtggatctggcgaagatccaaacaccaaaccgtacccgggcttggatccagcgtttcctcaccagcacaagcacaacaaatacggggtgatatatgacccagagaagataacgttcgtacaggctagagtgaagtgtcaaaacatgaatggtgaattggcatccatacacagcaaaagcgaagtggaattcttgaaacgtgttatacaatcaaactcaactctgatggaggacgcttggattggactgatccgaacactcggaaaaactggtggcgaccacaaatgggtggacggaagtcgttttgactacaaaaacttcgcgaagggcgagccaaaatactatacagagggggcttactgtggccagatgatcaccaacggagacgaactctctaaatggaaaatggttgactgcgccgaaagcgcatacacctttgtgtgcaaaaaacgcaagaatgacggcaaaggtaaagatcctggtggttcaggcggtggcccaaaagacaaacccaacaatatcgattcccctgaggaagaccctgacactacgcggcgaccaagaccaagaccagccacaccagcaccagtagaacctccaggtgtcatcctaccagaagactacacaacaactgaatcataccccgacgctactcaacctccccattgcaatccaaatacagcagatccggacgatccctcgtgcaaacctatatccgaatacgatcctatcgtagaagaaaaaggctgttatccagtgtga

SEQ ID NO: 201 - DNA, 2610 bp, Ancylostoma ceylanicum
atgttcgtcttagccgatttggagggtcccattctacgcgatagaaaacgatgtgtagcaggtgttgaggaaaccggtactgagaaggggaaccaaaaatggatagaggatacttggattgggttggtcatgcaaagcggtcctactgcattgtcatatcaatggacggatggaaccaatgtcgattttaaaaactttctggcaggtgaaccaaacttcggaagcgaggaacagtactgcacccagattctgtacgacaaagaattcggcccgaactttggcaagtggagagcagcgaactgcaccgatgaattatacgcctttatgtgcaaaagacctaaaaatcgcaatttgtggaaggaatgcaacccgaatcggtatttttctgacgtcttcaagggaaatgaatacgcggtaatgcataatggtgagaaagtgactttcctacaggctcgaatgcaatgtgaggatttgggcgcacagttagcatccatacacagcaatgaagaagttcagctcttgaaacgtgttatgcaatcgaactcgacactgatggaggacgcttggataggattggtctacaccgtcggcgctaccagtgcgtacaacagatggatagacaactctgccttcgattacaaaaatttcgcaccgggagagccaaatttttctaacgagggagaatactgtggccagattatgaccgaaggggacagcttcaccaaatggaaagttacaaactgtagcgagaatgcgtacaccttcgtgtgtaaaagacctcggacaggcaccggcggtggcccgggtggttcacatggaggtagtgtaactgatagcccttcggtcgttaatcctcccacggatacggatccaaggtttcctcaccagttcaagggaaacaaatatgctataatctacgacccaggaaaagtaaagttcgtgcaggcccgaacgcgatgtgaggatatgggtgcagaattggcatccatacacagcagggaagaggttgaattcctgaaaagtgttatacaatcaaactcaaccctgatggaggacgcttggataggaatggtctatactatcagcgctactagtgcggacaagaaatggatagacaactctccttttgactacaaaaatttcgccccgggagagccaaagtcttttggtgagggagactactgtggccagattataaccaatggagacgccttgtctaaatggagagttgcggactgtagcgaggatgcgtacaccttcgtgtgtaagaaatcctctagtgacaatgggagtggaggcgagggaccaggtggatcaggtggtggaggcacaggaggaggatctggcgaagatccaaacaccaaaccctctccggatacggatccaaggtttcctcacgagttcaagggagacaaatatgctatacaatacgagcctgggaaagtgaagtttgtacaggcccgaacgcagtgtgagaatatgggcgcagagttggcatccatacatagcagacaagaggctgaattcttgaaaggtgtcatgcaatcaaactcaacccttatggaggacgcttggataggaatggtctatactatcagcgctactagtgcgaataagaaatggatagacaactctccttttgactacaaaaattttgctccgggagagccaaagtcttttagtgagggagactactgtggccaaattatgaccgaaggggataacttgtctaaatggaaggttgtggactgtagcgaggaggcgtacaccttcgtgtgtaagaaatcctctaatagcaatgggaatggaggacatggaccaggtggatcaggtggcggaggcaaaggaggtggatctggcgaagatccaaacaccaaaccgtacccgggcttggatccagcgtttcctcaccagcacaagcacaacaaatacggggtgatatatgacccagagaagataacgttcgtacaggctagagtgaagtgtcaaaacatgaatggtgaattggcatccatacacagcaaaagcgaagtggaattcttgaaacgtgttatacaatcaaactcaactctgatggaggacgcttggattggactgatccgaacactcggaaaaactggtggcgaccacaaatgggtggacggaagtcgttttgactacaaaaacttcgcgaagggcgagccaaaatactatacagagggggcttactgtggccagatgatcaccaacggagacgaactctctaaatggaaaatggttgactgcgccgaaagcgcatacacctttgtgtgcaaaaaacgcaagaatgacggcaaaggtaaagatcctggtggttcaggcggtggcccaaaagacaaacccaacaatatcgattcccctgaggaagaccctgacactacgcggcgaccaagaccaagaccagccacaccagcaccagtagaacctccaggtgtcatcctaccagaagactacacaacaactgaatcataccccgacgctactcaacctccccattgcaatccaaatacagcagatccggacgatccctcgtgcaaacctatatccgaatacgatcctatcgtagaagaaaaaggctgttatccagtgtga

SEQ ID NO: 202 - DNA, 498 bp, Ancylostoma ceylanicum
atgcagaggagaaatgttctcctacttatggtactggcttgtttgccgtattttacgaacgggaataactctttgtcctgtaccggatggtacttatattttccaactggtcactgttataagccattttgtgagagactcgatttctatgaggcacggaagttttgcgaggggagcggcggttacctcgtatctatagcagatgctggtgaacaagaattcgtcaacggacttctctacggcagcctagacatccaagaatcatggattggctactatcgctcaaaataccgtggtccgtttgaatgggtggacaaatcaccaagcacgtttgagaaatggacggtaagagacggaagtccaaaagagccgaacaattggggttattatgaagcgtgctcggttatggaactcagcggtgattgggctgatctgaattgctacgccaagaaaactttcatctgtgaacgggagtcttgtcgagatcttccaaattga

SEQ ID NO: 203 - DNA, 447 bp, Ancylostoma ceylanicum
atgatgttatttagaagagaacctccaggggccgcatacatcattgagattacccgggtacaccaatttcagccattttgtgagagactcgatttctatgaggcacggaagttttgcgaggggagcggcggttacctcgtatctatagcagatgctggtgaacaagaattcgtcaacggacttctctacggcagcctagacatccaagaatcatggattggctactatcgctcaaaataccgtggtccgtttgaatgggtggacaaatcaccaagcacgtttgagaaatggacggtaagagacggaagtccaaaagagccgaacaattggggttattatgaagcgtgctcggttatggaactcagcggtgattgggctgatctgaattgctacgccaagaaaactttcatctgtgaacgggagtcttgtcgagatcttccaaattga

SEQ ID NO: 204 - DNA, 1110 bp, Ancylostoma ceylanicum
atgtcgcgcgaaacgatggctttgtcgggcggagacgtcatcggcaacaccccactgctgaggctgaacaaaataactgaaggactgggggcaaccattgacaatttctccattcattttgactttacaacgagcacggagcagttcccgcacaagaagaggccaagggctggacgtttcattgagattaaccaggcggttaaactcgagtacatgaacccagcaggatcagtgaaggatcgcatagcgttcaatatgattgaaaccgccgagaaggagggcaaaataacgcccggcaagacggtgctcatcgagccaaccagtggcaacatgggtattgcactggcatattgtgctgccctcaaagggtacaagttgattttaacgatgccgtcatcgatgagtgtggaaagacgtgcactactcaaggcctacggtgctgaggttgtccttaccaatcccgcgttcgctgtcaaaggtgcaatagaacgagcacaggaactagccgcagcgataccaaattcacacattctgaaccagttcgccaaccctgccaatccacaggcgcattatctgaggactggaccggagatctggaagcagacagatggaaaggtcgacattgtgtgcttcggagttggttcaggcggtacctgcactggtgtggggcgatatctaaaggaaaagaaccccaacattcaggtgtatccagttgaaccctatgaatcgtcggtcatcaatggccttccacaccatcctcataagatacaaggcatgggtattggcatgatcccagaggtgcttgattgctcactgtttactgaagctctacgagtgcattccgatgacgctatcgctatggcaaagcgtctggcaagagaagaggcaattctaggtggaatatcgtctggtgcaaatgtctgtgctgcgatacagcttgcgaaacgaccagagaacaaaggcaaactgatagtgacgactgtcaatagcttcggagaacgttacctgtctacagcattgtactcagagatacgtgagaaagccgcggctatggatcaaatgtctttcgaggagtccatcgccagtgcaaaagcgtaccttggaatctag

SEQ ID NO: 205 - DNA, 1128 bp, Ancylostoma ceylanicum
atgtgcttctcacagaaaatgtcgcgcgaaacgatggctttgtcgggcggagacgtcatcggcaacaccccactgctgaggctgaacaaaataactgaaggactgggggcaaccattgacaatttctccattcattttgactttacaacgagcacggagcagttcccgcacaagaagaggccaagggctggacgtttcattgagattaaccaggcggttaaactcgagtacatgaacccagcaggatcagtgaaggatcgcatagcgttcaatatgattgaaaccgccgagaaggagggcaaaataacgcccggcaagacggtgctcatcgagccaaccagtggcaacatgggtattgcactggcatattgtgctgccctcaaagggtacaagttgattttaacgatgccgtcatcgatgagtgtggaaagacgtgcactactcaaggcctacggtgctgaggttgtccttaccaatcccgcgttcgctgtcaaaggtgcaatagaacgagcacaggaactagccgcagcgataccaaattcacacattctgaaccagttcgccaaccctgccaatccacaggcgcattatctgaggactggaccggagatctggaagcagacagatggaaaggtcgacattgtgtgcttcggagttggttcaggcggtacctgcactggtgtggggcgatatctaaaggaaaagaaccccaacattcaggtgtatccagttgaaccctatgaatcgtcggtcatcaatggccttccacaccatcctcataagatacaaggcatgggtattggcatgatcccagaggtgcttgattgctcactgtttactgaagctctacgagtgcattccgatgacgctatcgctatggcaaagcgtctggcaagagaagaggcaattctaggtggaatatcgtctggtgcaaatgtctgtgctgcgatacagcttgcgaaacgaccagagaacaaaggcaaactgatagtgacgactgtcaatagcttcggagaacgttacctgtctacagcattgtactcagagatacgtgagaaagccgcggctatggatcaaatgtctttcgaggagtccatcgccagtgcaaaagcgtaccttggaatctag

SEQ ID NO: 206 - DNA, 2337 bp, Ancylostoma ceylanicum
atggcgcaggcagctaagaactggtatcaggtgatcaaagctgcccccaagggacgatttcaaggcattaaacgagactaccaggtcgaagacgtactaaaactccgtggatcagtagaaatcgagtacacactagctacccgtggggctaacaagctatggcaactccttcacaccgaaccgttcgtgcctgcgctaggagctcaaaccggaaaccaagccgtgcagatggtccgtgctggcttgaaggccatctacctatcaggctggcaagtggcggccgacgccaacacggctggcgatatgtatccggatcaatcattgtacccggccaattccggcccagaactctgccgaagaatcaataggtcattgaggagagcggatcagatcgaagccgtcgaagcagaagactacctggctcaacgagactggtacgctcccatcgttgcggatgcagaagcaggattcggtggagcgctgaattgtttcgaattgatgaaggcgtacatcgaagccggagcggccggtgtccacttcgaggatcaactgggctcagagaagaaatgcggccatatgggaggaaaagtgctcatccccaccgctcaacacatccgccacctgaacgccgcccgtctggctgccgacgtctgcggcgcgccgacgatcatcgtggccaggacagatgcggagtccagccggctgctgacgagtgatgtcgatgaacgagatcatccattcattgatagagccgctggacgaactgtggagggattctatagactaaaggactccacagctctgcagtactgtattgatcgtgctattaactatgctccgtactgtgacctcatctggatggaaaccagtcatccgacgattgccgatgccagagagttcgccgaaggtgttcgaaaggtctacccagacaaaatgttcgcctacaactgctcgccatcgttcaactggaagaagcatctcagcccagctcagatggagaagttccagaaggaactcggcgctctcggctttaagtatcagttcatcactttggctggattccatgctaacagctacagtatgttcgatctagccaggaactacaaggacaaaggaatgctggcgtactcccagcttcaggaggcggagtttgaatctgaaaaacacggctactccgctgttaagcaccagcgtgaagtcggtactggctactttgaccacatttccaacgctgtcactggaggacagtccagcaccaccgcactgactggatctactgaggaggcgcagttcttcaccgccaccgccagcagcgaggatgaggagatcatgacgcttaccgcaccgactctggctggcgatgagaagatcctcactccggatgcgctccgcttcatcaaggaactgaacaagaagttcgacgagaagcgtaggaagctgttgaagaagagagtggttctgcagaaagatatcaacgaaggagcatggttccccgacttcgcctcagataccgctaacatccgagacgatatgggatggaagggagctgaaatccccgatgatctccagaatcgtcgcgtagagatcactgggcctacggacaggaagatgattatcaatgcccttaactctggagctaacgtcttcatggccgatttcgaggactccaacaccccatcgtggaggaaccagctggatggacagatcaatctctacgacgctgtcaggaacaacatctcctacatgcatccaacgacgaagaaggagtacacattgaacaaggagacctctgttctgaaggttcgccctcgaggctggcaccttcctgagaagcacgtgctgatccacaacaagcccacttctggatcgctgttcgacttcggcttattcgtctatcacaacgcaagggccctcatggacaagggaagcggcccgtacttctacttgccgaagttgcaaagcgccgaagaggccaagttgtgggctgaggtgttccagtacaccgaggagcgcctcgacctgcccaagggcacgatcaagtgcacagtgctgatcgagcatctgttggctagcttccaaatgaacgaaatcatctacgcgctgaaggactacatcgttggattgaactgtggccgatgggactacatcttctcctacatcaagacattccagaaccacaggaaattcttgctcccggatagattccagattggtatgacatccccattcatgcgagcctactctctgctttgcatcaagacctgccatcaacgaggtatccatgcgatgggtggaatggctgcacagatcccgatcaagaacgatgaggtgagataa

SEQ ID NO: 207 - DNA, 774 bp, Ancylostoma ceylanicum
atggagcgatggcaggtgtgccgctacggaaacgccatgttctatcacatgtcacgagaacagtgtgaggttgctaacgggaaggccatctcattggtacgacaagataaggaacgggaagcgactgatggacacgatggtacctgggtcgctcatcctggattggtcccgattgctcgccaagtctttgatgagtgtatgccaacgcctaaccaactgcacaaacaactcgaaagcctcctaaccaccaaggcagacctaaccgctatcccagaaggaacccgcaccgaggccggatttaggcataacatcagcgtcaccctaggtaagactagacccctcaagatccatgggatctacaaaaatccatatttccaggatatcttgactcatggctccgcggtgtcggctgcgtccctctctacaacctcatggaagacgctgccacagcagaaatcagccgcgcccagctttggcaatggctcaagcacgacgcgagactcgaaggtaggtgctgagggtgcgattgggtgcgaatcgctgcgattctcagactgcgatcgggtattttttgcagatggccgtactgttgacgctcaacttgttaagcagaccatcgccgccgagactgagaggcgtctgatccgcgcgggatcggttgtcagcaggcttcctgaagcagccgagctcctggagaaattcgcactcgaggagaacatgagcgatttcttaacgctggacgcctacgataaattggtctctgagggtcactaa

SEQ ID NO: 208 - DNA, 993 bp, Ancylostoma ceylanicum
atggccgatattgttaagcctggcgaaggagatattgtggctctggcgatgatcaacaccattttatgtggagcattcgcagctcttacatttctcattattcatttcctgacaatgggaaaatggactttactgctcacgataaacgcgtgcctagcaggaatggtctctgcttgcgctggttgcaaccgaatggaaccgtgggcgtcctcattcaccgggattggagcagggctcatttacctcggcctcagtcactttatgatcaaaataaaagtggatgacccattggacgcatttgctgtgcatgctggtggtggtttctggggtctactttcgacctgcattattgcacatgatgggattgtgtacgcgattgcggacgctatcggaaacaagcacggagcgctttccagtcgacgagcattcgctcaactaggatggcagttaatctgcattgttgcaattattacgtggtcactgctgtggatggtcccaatatttctatttttgaagaagataggaaagctacgtgttagtgaagaggtcgagatcaatggtcttgacatctacaagcatggcgaagcggcttacccattgcatgcgtacggtcacggatgggatgagtacgaacccataaaggacaagtcaacaggcagagcaaccaatcgtcggaaattcagtgatcatgctgagatttcgctggagcagctggcagcagcctacgaaaggagaacaagtgttgctcctatagccatgctcagctcaacaattaatggagaagggtctcgtaggaagagcctctatgtcaatccctctcattatgagcatccagaacaccactcacaagccaaggaaaagaacagagtgcaaaagcgggttacgcataatcccaccgtcgagatggcacccagtgtaccgacaacggccaagtcttcccgagcagatatcttggatatgtatgaggatgaacctcagcagatgcgaatttag

SEQ ID NO: 209 - DNA, 1026 bp, Ancylostoma ceylanicum
atgttcggctttcttgctttcaacggagggtcaatggccgatattgttaagcctggcgaaggagatattgtggctctggcgatgatcaacaccattttatgtggagcattcgcagctcttacatttctcattattcatttcctgacaatgggaaaatggactttactgctcacgataaacgcgtgcctagcaggaatggtctctgcttgcgctggttgcaaccgaatggaaccgtgggcgtcctcattcaccgggattggagcagggctcatttacctcggcctcagtcactttatgatcaaaataaaagtggatgacccattggacgcatttgctgtgcatgctggtggtggtttctggggtctactttcgacctgcattattgcacatgatgggattgtgtacgcgattgcggacgctatcggaaacaagcacggagcgctttccagtcgacgagcattcgctcaactaggatggcagttaatctgcattgttgcaattattacgtggtcactgctgtggatggtcccaatatttctatttttgaagaagataggaaagctacgtgttagtgaagaggtcgagatcaatggtcttgacatctacaagcatggcgaagcggcttacccattgcatgcgtacggtcacggatgggatgagtacgaacccataaaggacaagtcaacaggcagagcaaccaatcgtcggaaattcagtgatcatgctgagatttcgctggagcagctggcagcagcctacgaaaggagaacaagtgttgctcctatagccatgctcagctcaacaattaatggagaagggtctcgtaggaagagcctctatgtcaatccctctcattatgagcatccagaacaccactcacaagccaaggaaaagaacagagtgcaaaagcgggttacgcataatcccaccgtcgagatggcacccagtgtaccgacaacggccaagtcttcccgagcagatatcttggatatgtatgaggatgaacctcagcagatgcgaatttag

SEQ ID NO: 210 - DNA, 342 bp, Ancylostoma ceylanicum
atggacaactttcaaatttcaatagccaccattgatcatcgcgaagaaattcgagatttcataatgaagcattttctagtggaagagacaatgaatgtggcaactgctattaccgaagaagaattcgccccattcgctgatgcctcgcttgactcttcattgctaactccattttccgtactttgccgcagtgaatcaggtgacctagctggagttgcattgagctcaatatgtcatcgagacgatcctgaattttcgaatccattgggatcaccgcgaaggccggaaattgcagctattggtaaggctgatatttattttcaattatcacgagagctgtag

SEQ ID NO: 211 - DNA, 546 bp, Ancylostoma ceylanicum
atggacaactttcaaatttcaatagccaccattgatcatcgcgaagaaattcgagatttcataatgaagcattttctagtggaagagacaatgaatgtggcaactgctattaccgaagaagaattcgccccattcgctgatgcctcgcttgactcttcattgctaactccattttccgtactttgccgcagtgaatcaggtgacctagctggagttgcattgagctcaatatgtcatcgagacgatcctgaattttcgaatccattgggatcaccgcgaaggccggaaattgcagctattgcaacgatatgtgaggaaatacacggatctatctggagattgcttgaccccaagataaatactgttcttgaacttgatattttgagtgtagcacttccgtaccaacgacggggtattgctggtaaaatgctcgagaaaagaaaatccccagaactcttgaaggaatttgaagtgcaaggttttatctgtcaggcttcttcctttgctaatcaaatgttgctgagaaaaagaggacataaggtatga

SEQ ID NO: 212 - DNA, 654 bp, Ancylostoma ceylanicum
atggacaactttcaaatttcaatagccaccattgatcatcgcgaagaaattcgagatttcataatgaagcattttctagtggaagagacaatgaatgtggcaactgctattaccgaagaagaattcgccccattcgctgatgcctcgcttgactcttcattgctaactccattttccgtactttgccgcagtgaatcaggtgacctagctggagttgcattgagctcaatatgtcatcgagacgatcctgaattttcgaatccattgggatcaccgcgaaggccggaaattgcagctattgcaacgatatgtgaggaaatacacggatctatctggagattgcttgaccccaagataaatactgttcttgaacttgatattttgagtgtagcacttccgtaccaacgacggggtattgctggtaaaatgctcgagaaaagaaaatccccagaactcttgaaggaatttgaagtgcaaggttttatctgtcaggcttcttcctttgctaatcaaatgttgctgagaaaaagaggacataaggaaatcaaagacgtcccatttgcccgttttgccgaccaaaatggagcacagcttattaaaccgcacgatcagacgcgatctgttaagcttttctggaagccatataatccgtaa

SEQ ID NO: 213 - DNA, 666 bp, Ancylostoma ceylanicum
atggacaactttcaaatttcaatagccaccattgatcatcgcgaagaaattcgagatttcataatgaagcattttctagtggaagagacaatgaatgtggcaactgctattaccgaagaagaattcgccccattcgctgatgcctcgcttgactcttcattgctaactccattttccgtactttgccgcagtgaatcaggtgacctagctggagttgcattgagctcaatatgtcatcgagacgatcctgaattttcgaatccattgggatcaccgcgaaggccggaaattgcagctattgcagtattgcatactaactaccacggcgagttattgaaattgtcagcaggcggatacattattctttccaaagtcacgggcgggctcctttccatatcaatgcaggcgcagaagcgcggcgcaacgatatgtgaggaaatacacggatctatctggagattgcttgaccccaagataaatactgttcttgaacttgatattttgagtgtagcacttccgtaccaacgacggggtattgctggtaaaatgctcgagaaaagaaaatccccagaactcttgaaggaatttgaagtgcaaggttttatctgtcaggcttcttcctttgctaatcaaatgttgctgagaaaaagaggacataaggtatga

SEQ ID NO: 214 - DNA, 774 bp, Ancylostoma ceylanicum
atggacaactttcaaatttcaatagccaccattgatcatcgcgaagaaattcgagatttcataatgaagcattttctagtggaagagacaatgaatgtggcaactgctattaccgaagaagaattcgccccattcgctgatgcctcgcttgactcttcattgctaactccattttccgtactttgccgcagtgaatcaggtgacctagctggagttgcattgagctcaatatgtcatcgagacgatcctgaattttcgaatccattgggatcaccgcgaaggccggaaattgcagctattgcagtattgcatactaactaccacggcgagttattgaaattgtcagcaggcggatacattattctttccaaagtcacgggcgggctcctttccatatcaatgcaggcgcagaagcgcggcgcaacgatatgtgaggaaatacacggatctatctggagattgcttgaccccaagataaatactgttcttgaacttgatattttgagtgtagcacttccgtaccaacgacggggtattgctggtaaaatgctcgagaaaagaaaatccccagaactcttgaaggaatttgaagtgcaaggttttatctgtcaggcttcttcctttgctaatcaaatgttgctgagaaaaagaggacataaggaaatcaaagacgtcccatttgcccgttttgccgaccaaaatggagcacagcttattaaaccgcacgatcagacgcgatctgttaagcttttctggaagccatataatccgtaa

SEQ ID NO: 215 - DNA, 489 bp, Ancylostoma ceylanicum
atggagaggactttagcagtattgcatactaactaccacggcgagttattgaaattgtcagcaggcggatacattattctttccaaagtcacgggcgggctcctttccatatcaatgcaggcgcagaagcgcggcgcaacgatatgtgaggaaatacacggatctatctggagattgcttgaccccaagataaatactgttcttgaacttgatattttgagtgtagcacttccgtaccaacgacggggtattgctggtaaaatgctcgagaaaagaaaatccccagaactcttgaaggaatttgaagtgcaaggttttatctgtcaggcttcttcctttgctaatcaaatgttgctgagaaaaagaggacataaggaaatcaaagacgtcccatttgcccgttttgccgaccaaaatggagcacagcttattaaaccgcacgatcagacgcgatctgttaagcttttctggaagccatataatccgtaa

SEQ ID NO: 216 - DNA, 834 bp, Ancylostoma ceylanicum
atgatcacgcatactcctgtcatatttatacatgggaactcagacgctgccctacatgtgtcgaaaacagctaccggatggacaaactcaatccagtatttcttggacaacggctacacacaagcagagctctatgcgacatcctggggtgacacgaacacatcgaacgctgtgaaaaggactcacaactgccgcgatctgctacgtctcagacggtttgtgctggctgtgctcgactacacaggagcaccgaaggtgtcactgataacgcacagtatgggtgtcacattgggacggaagttgattaaaggaggagctgtgaacggaaatgatggttcatgcaatcttggcaatccactcacctcaaaaatagacgtattccttggacttgctggaggaaactacggattgtgtaactgtgaaggtgccggaacactggagccaacgtgcaacaagaagaacggcttctggccgggtgactcttgcggacttaacacctacacatgtggtctgaaaccgttaccatttccttgcaacgggcccacatactcttccctgctgatgagcatgaacacggacaacgtcagggaagcatctcttgttttctcagcctggagcgaagtagatgatcttatactctatggagatcaagtatggggtaggccgacatcattgattccatcatctagtggaaaggtggtctacacatcctacacgcacatgcagaccaaagagaacaccgctgcggaccagtacacgatggttgtgaagaagacgcttccttcaccaagaagcagtgaaattgatgacagtagttttgtccctgcaaactaa

SEQ ID NO: 217 - DNA, 834 bp, Ancylostoma ceylanicum; identical to SEQ ID NO: 216

SEQ ID NO: 218 - DNA, 201 bp, Ancylostoma ceylanicum
atgaaaactgagaggaaaatcattccagagaagtgtccttgtccaaatattttttttgctacttttttgtatcacttctttcaaggtggcgttcacggtgccaaccgactcgccggcaactcgctgctcgaatgtgtggtgttcggcagaatcgcagggcgaaacgcagccgccaccaactacacccacgaagagttatga

SEQ ID NO: 219 - DNA, 1707 bp, Ancylostoma ceylanicum
atggagggcccaccgtcagctgggggtccaccatgggataacggtgggcccaccgtggtacgaaagttcagtgttattggtattctcatctgctctttcaatggtgaagatactctgaattttcttaccacggcgccttcgcaagatgaaccggtgatcattgttggtggtggattggcgggactctccgcggcactggaagctctggaccgcaacagcaaagtgattatcattgatggagagaagaatcttggaggaaactcggcgaaagccagcagtgtttcgcacggggcggcatttatctttgcgatcagcagccactgcagattctcaagaaccactcaggagtgggacatcccttctcagggcgtaagtgcatgtgaaacagtcacacaaaagcgtatgggaattcaagactcgaagaatctcttctacatggacacaatgaacgccggtgatcgtgaaaatgatgaaactctggtggatctgttagtggaatcatcatctgacgctattgatttcctcataggacttggcgttgatctaagtgacatcaatctgtgtggtggacattcggtgccgaggacacactggatcccttcacctaaagaaggccgacctgtgaatgttggctttggcattatatcaaaagccaaggagcgtatactagagatccagaaggcaagacctgatgacgtcaagatcatgactgagacgcgtgtagtagggctgacctcgtggaacgcgtatgtgaacggagtgaatgtagtcaaggatgggaaacgatcggagataaatgggaaagccgtgatcttggctacaggtggattcagtgcggataaaaacgaggatgccagtttattgcacgaatttgccagtgataagttgaaattccccaccacaaatggtccttgggcaagaggcgatggtgtaaagatggcgcgagccatgggtgctcaggtaattggtatggacagggttcaaatccatccaacagctttcgttgatccagctgatccagcagctggcactaaatttctagcagcagaggcgctgagaggaaaaggagctatcctaatcaactcgaatggtgttcgatttgcgaatgaactcggaagacgcgattatgtgaccggaaaaattctccacgaatgcaaaccaatcgaagtcttccataatggctcagcaggattgtcgtcagcgattatgctgatgagcgacgaggcagcagactcttttggacgtccggcattctctttctaccatgttgtgaagaagtttttcacgaaatacaacacaatgaaggacttcgcttccgcagctggtattccctacgaagtgttaaaagaaacgattgagaaatataacaaattcgtagaagccggtaaaagtggagctaaagaaaaggatgcctttggaaagacggtgttccctgtggcgttcgatctagagaaaccgatctatgccgcaattatcacaccagcaattcattatacaatgggtggtttgaagatcaacaaacaggcccaagtgcttaatgagttcaccgcagcacctttcaagggattactcgcggccggagaggtcactggtggcgttcacggtgccaaccgactcgccggcaactcgctgctcgaatgtgtggtgttcggcagaatcgcagggcgaaacgcagccgccaccaactacacccacgaagagttatga

SEQ ID NO: 220 - DNA, 1632 bp, Ancylostoma ceylanicum
atggagggcccaccgtcagctgggggtccaccatgggataacggtgggcccaccgtggcgccttcgcaagatgaaccggtgatcattgttggtggtggattggcgggactctccgcggcactggaagctctggaccgcaacagcaaagtgattatcattgatggagagaagaatcttggaggaaactcggcgaaagccagcagtgtttcgcacggggcggcatttatctttgcgatcagcagccactgcagattctcaagaaccactcaggagtgggacatcccttctcagggcgtaagtgcatgtgaaacagtcacacaaaagcgtatgggaattcaagactcgaagaatctcttctacatggacacaatgaacgccggtgatcgtgaaaatgatgaaactctggtggatctgttagtggaatcatcatctgacgctattgatttcctcataggacttggcgttgatctaagtgacatcaatctgtgtggtggacattcggtgccgaggacacactggatcccttcacctaaagaaggccgacctgtgaatgttggctttggcattatatcaaaagccaaggagcgtatactagagatccagaaggcaagacctgatgacgtcaagatcatgactgagacgcgtgtagtagggctgacctcgtggaacgcgtatgtgaacggagtgaatgtagtcaaggatgggaaacgatcggagataaatgggaaagccgtgatcttggctacaggtggattcagtgcggataaaaacgaggatgccagtttattgcacgaatttgccagtgataagttgaaattccccaccacaaatggtccttgggcaagaggcgatggtgtaaagatggcgcgagccatgggtgctcaggtaattggtatggacagggttcaaatccatccaacagctttcgttgatccagctgatccagcagctggcactaaatttctagcagcagaggcgctgagaggaaaaggagctatcctaatcaactcgaatggtgttcgatttgcgaatgaactcggaagacgcgattatgtgaccggaaaaattctccacgaatgcaaaccaatcgaagtcttccataatggctcagcaggattgtcgtcagcgattatgctgatgagcgacgaggcagcagactcttttggacgtccggcattctctttctaccatgttgtgaagaagtttttcacgaaatacaacacaatgaaggacttcgcttccgcagctggtattccctacgaagtgttaaaagaaacgattgagaaatataacaaattcgtagaagccggtaaaagtggagctaaagaaaaggatgcctttggaaagacggtgttccctgtggcgttcgatctagagaaaccgatctatgccgcaattatcacaccagcaattcattatacaatgggtggtttgaagatcaacaaacaggcccaagtgcttaatgagttcaccgcagcacctttcaagggattactcgcggccggagaggtcactggtggcgttcacggtgccaaccgactcgccggcaactcgctgctcgaatgtgtggtgttcggcagaatcgcagggcgaaacgcagccgccaccaactacacccacgaagagttatga

SEQ ID NO: 221 - DNA, 1620 bp, Ancylostoma ceylanicum
atgaatggtgctctactcagattactactaacaagaaatggcttggcgccttcgcaagatgaaccggtgatcattgttggtggtggattggcgggactctccgcggcactggaagctctggaccgcaacagcaaagtgattatcattgatggagagaagaatcttggaggaaactcggcgaaagccagcagtgtttcgcacggggcggcatttatctttgcgatcagcagccactgcagattctcaagaaccactcaggagtgggacatcccttctcagggcgtaagtgcatgtgaaacagtcacacaaaagcgtatgggaattcaagactcgaagaatctcttctacatggacacaatgaacgccggtgatcgtgaaaatgatgaaactctggtggatctgttagtggaatcatcatctgacgctattgatttcctcataggacttggcgttgatctaagtgacatcaatctgtgtggtggacattcggtgccgaggacacactggatcccttcacctaaagaaggccgacctgtgaatgttggctttggcattatatcaaaagccaaggagcgtatactagagatccagaaggcaagacctgatgacgtcaagatcatgactgagacgcgtgtagtagggctgacctcgtggaacgcgtatgtgaacggagtgaatgtagtcaaggatgggaaacgatcggagataaatgggaaagccgtgatcttggctacaggtggattcagtgcggataaaaacgaggatgccagtttattgcacgaatttgccagtgataagttgaaattccccaccacaaatggtccttgggcaagaggcgatggtgtaaagatggcgcgagccatgggtgctcaggtaattggtatggacagggttcaaatccatccaacagctttcgttgatccagctgatccagcagctggcactaaatttctagcagcagaggcgctgagaggaaaaggagctatcctaatcaactcgaatggtgttcgatttgcgaatgaactcggaagacgcgattatgtgaccggaaaaattctccacgaatgcaaaccaatcgaagtcttccataatggctcagcaggattgtcgtcagcgattatgctgatgagcgacgaggcagcagactcttttggacgtccggcattctctttctaccatgttgtgaagaagtttttcacgaaatacaacacaatgaaggacttcgcttccgcagctggtattccctacgaagtgttaaaagaaacgattgagaaatataacaaattcgtagaagccggtaaaagtggagctaaagaaaaggatgcctttggaaagacggtgttccctgtggcgttcgatctagagaaaccgatctatgccgcaattatcacaccagcaattcattatacaatgggtggtttgaagatcaacaaacaggcccaagtgcttaatgagttcaccgcagcacctttcaagggattactcgcggccggagaggtcactggtggcgttcacggtgccaaccgactcgccggcaactcgctgctcgaatgtgtggtgttcggcagaatcgcagggcgaaacgcagccgccaccaactacacccacgaagagttatga

SEQ ID NO: 222 - DNA, 1704 bp, Ancylostoma ceylanicum
atgctggtgctcctcgcaagcgttgcgatcgtcttcagtatcacaacgactatggccgaagtcaggagaaagggtgagcccaaaaaactgtcgaaaattttcgagaaggcactgccggcagattttcaggcgccttcgcaagatgaaccggtgatcattgttggtggtggattggcgggactctccgcggcactggaagctctggaccgcaacagcaaagtgattatcattgatggagagaagaatcttggaggaaactcggcgaaagccagcagtgtttcgcacggggcggcatttatctttgcgatcagcagccactgcagattctcaagaaccactcaggagtgggacatcccttctcagggcgtaagtgcatgtgaaacagtcacacaaaagcgtatgggaattcaagactcgaagaatctcttctacatggacacaatgaacgccggtgatcgtgaaaatgatgaaactctggtggatctgttagtggaatcatcatctgacgctattgatttcctcataggacttggcgttgatctaagtgacatcaatctgtgtggtggacattcggtgccgaggacacactggatcccttcacctaaagaaggccgacctgtgaatgttggctttggcattatatcaaaagccaaggagcgtatactagagatccagaaggcaagacctgatgacgtcaagatcatgactgagacgcgtgtagtagggctgacctcgtggaacgcgtatgtgaacggagtgaatgtagtcaaggatgggaaacgatcggagataaatgggaaagccgtgatcttggctacaggtggattcagtgcggataaaaacgaggatgccagtttattgcacgaatttgccagtgataagttgaaattccccaccacaaatggtccttgggcaagaggcgatggtgtaaagatggcgcgagccatgggtgctcaggtaattggtatggacagggttcaaatccatccaacagctttcgttgatccagctgatccagcagctggcactaaatttctagcagcagaggcgctgagaggaaaaggagctatcctaatcaactcgaatggtgttcgatttgcgaatgaactcggaagacgcgattatgtgaccggaaaaattctccacgaatgcaaaccaatcgaagtcttccataatggctcagcaggattgtcgtcagcgattatgctgatgagcgacgaggcagcagactcttttggacgtccggcattctctttctaccatgttgtgaagaagtttttcacgaaatacaacacaatgaaggacttcgcttccgcagctggtattccctacgaagtgttaaaagaaacgattgagaaatataacaaattcgtagaagccggtaaaagtggagctaaagaaaaggatgcctttggaaagacggtgttccctgtggcgttcgatctagagaaaccgatctatgccgcaattatcacaccagcaattcattatacaatgggtggtttgaagatcaacaaacaggcccaagtgcttaatgagttcaccgcagcacctttcaagggattactcgcggccggagaggtcactggtggcgttcacggtgccaaccgactcgccggcaactcgctgctcgaatgtgtggtgttcggcagaatcgcagggcgaaacgcagccgccaccaactacacccacgaagagttatga

SEQ ID NO: 223 - DNA, 288 bp, Ancylostoma ceylanicum
atggagggcccaccgtcagctgggggtccaccatgggataacggtgggcccaccgtggtacgaaagttcagtgttattggtattctcatctgctctttcaatggtgaagatactctgaattttcttaccacggcgccttcgcaagatgaaccggtgatcattgttggtggtggattggcgggactctccgcggcactggaagctctggaccgcaacagcaaagtgattatcattgatggagagaagaatcttggaggaaactcggcgaaagccagcagtggtgagtaa

SEQ ID NO: 224 - DNA, 2352 bp, Ancylostoma ceylanicum
atgaataacacccttacaacaccaccaaactgtcaacataacctttctaaggcactgcgattttcctcggcgtacacaagtggctaccagccgctaccgatcgatccagcatgggcggaaatggcaaagaaagcaatgaaggggaaggatccgaacagtctgatctggcacacacccgaaggcatccccatcaagccactgtacctcaaggatgaccgaaagtgcgatgaaggaaagcccactgagccactgtacctcaaggatgaccgaaagtgcgatgaaggaaagcctactgagttgcccggcaaataccccttcagccgtggaccatatccaacaatgtacacgcagcgaccgtggacgattcgacaatacgccggcttctcaactgtagaggagtccaacaaattctacaaggaaaacatcaaggctggtcagcaaggactttcagtggcctttgacttggccactcatagaggttatgactccgacaacccgcgtgtgtttggtgacgttggtatggctggtgtagctgtagactctgtagaggacatgaaacagctctttgacggaatcgaccttagcaagatgagtgtgtcaatgacaatgaatggagctgtcatcccagttcttgctatgtacatagtcgctgctgaggagtctggtgtcgaccgcaaactactggctggaactattcaaaacgatattctgaaggaattcatggtgcgtaacacttacatctacccaccagatccatcaatgcgtattattggagacattttcgcctacaccagtaaggaaatgcccaaatggaacagcatttcaatttctggatatcacatgcaggaagctggtgccgatgctgttttggagatggccttcaccattgccgacggtatccagtactgcgaaactggtctcaatgctggtctcaccattgatgcattcgcacctcgactaagcttcttctggggtatcggtatgaacttctacatggagattgcaaagatgcgtgctgcacgccgcctttgggccaatctcctcaaggagcgtttccagcccaagagcaacaaatcgctcatgcttcgcactcactcacagactagcggatggtcccttaccgagcaggatccatacaacaacatcatccgtacaactattgaagccatggcttcggtattcggcggaacccagtccctccacaccaactcttttgatgaagctcttggtctgccaactaagttctctgctcgcattgccagaaacactcaaatcatcatccaggaagagagcggtatctgcagagtggctgatccatggggaggatcgtacatgatggagtcactaacggatgagctttatgagaaggctagaaaggtcattgccgaaattgacgaacttggtggtatggccaaagctgtcgcgtctggcatgacaaaactgcgaattgaagaggcagctgcgaagaagcaagctcgaatcgacgctggcaaagacgtcattgttggtgtaaacaagtaccgactcgacaaggaaaccgttgtcgatgtactcaaagtcgacaaccagaaagtacgtgagaaacaaatcgctaaattggaacatatccgtaagacaagggatccacagcgcgccaaggcagcccttgaagctatcacaaagggagctgctggcaaagaaaaccttctcgagttggccgtcgaggcttcgcgagctcgttgcagtgtcggagaaatcagtgatgctatggagaaagtattcacacgttatgctgctatcaacagaatggtgtctggtgcttacaagtcagagtttggagagacgactgaaatggctcaggtgatggaacgtgtaaagcaattcgcagcaaaggaaggtcgtcaaccacgtatcatggtagccaagatgggtcaagacggtcacgaccgtggagcgaaagttgttgctactggatttgcggatcttggtataatcattttcttcgcatttgttttcaataagttatgcgctatgagcggttcaggctttgacgtggacgttggaccacttttccaaacccctgccgaggcggctcagcaagcagttgacgctgatgtacacgtggttggcgctagcagtcttgctgctggacacttgacgcttgttccacagctcattcaggagttggctaaattgggtagagaggacattattgtggttgctggaggtgtcattccaccacaagactacgatgagctctacaaggccggagtatctctaatctttggacctggaactaggctgccagcctgcgctatgcaagtgttggacaaactggaaggaaatctggagaagcagagcgccaagtcgtga

SEQ ID NO: 225 - DNA, 2334 bp, Ancylostoma ceylanicum
atgctccaaatcaggaaactgctgctgacgcaggcactgcgattttcctcggcgtacacaagtggctaccagccgctaccgatcgatccagcatgggcggaaatggcaaagaaagcaatgaaggggaaggatccgaacagtctgatctggcacacacccgaaggcatccccatcaagccactgtacctcaaggatgaccgaaagtgcgatgaaggaaagcccactgagccactgtacctcaaggatgaccgaaagtgcgatgaaggaaagcctactgagttgcccggcaaataccccttcagccgtggaccatatccaacaatgtacacgcagcgaccgtggacgattcgacaatacgccggcttctcaactgtagaggagtccaacaaattctacaaggaaaacatcaaggctggtcagcaaggactttcagtggcctttgacttggccactcatagaggttatgactccgacaacccgcgtgtgtttggtgacgttggtatggctggtgtagctgtagactctgtagaggacatgaaacagctctttgacggaatcgaccttagcaagatgagtgtgtcaatgacaatgaatggagctgtcatcccagttcttgctatgtacatagtcgctgctgaggagtctggtgtcgaccgcaaactactggctggaactattcaaaacgatattctgaaggaattcatggtgcgtaacacttacatctacccaccagatccatcaatgcgtattattggagacattttcgcctacaccagtaaggaaatgcccaaatggaacagcatttcaatttctggatatcacatgcaggaagctggtgccgatgctgttttggagatggccttcaccattgccgacggtatccagtactgcgaaactggtctcaatgctggtctcaccattgatgcattcgcacctcgactaagcttcttctggggtatcggtatgaacttctacatggagattgcaaagatgcgtgctgcacgccgcctttgggccaatctcctcaaggagcgtttccagcccaagagcaacaaatcgctcatgcttcgcactcactcacagactagcggatggtcccttaccgagcaggatccatacaacaacatcatccgtacaactattgaagccatggcttcggtattcggcggaacccagtccctccacaccaactcttttgatgaagctcttggtctgccaactaagttctctgctcgcattgccagaaacactcaaatcatcatccaggaagagagcggtatctgcagagtggctgatccatggggaggatcgtacatgatggagtcactaacggatgagctttatgagaaggctagaaaggtcattgccgaaattgacgaacttggtggtatggccaaagctgtcgcgtctggcatgacaaaactgcgaattgaagaggcagctgcgaagaagcaagctcgaatcgacgctggcaaagacgtcattgttggtgtaaacaagtaccgactcgacaaggaaaccgttgtcgatgtactcaaagtcgacaaccagaaagtacgtgagaaacaaatcgctaaattggaacatatccgtaagacaagggatccacagcgcgccaaggcagcccttgaagctatcacaaagggagctgctggcaaagaaaaccttctcgagttggccgtcgaggcttcgcgagctcgttgcagtgtcggagaaatcagtgatgctatggagaaagtattcacacgttatgctgctatcaacagaatggtgtctggtgcttacaagtcagagtttggagagacgactgaaatggctcaggtgatggaacgtgtaaagcaattcgcagcaaaggaaggtcgtcaaccacgtatcatggtagccaagatgggtcaagacggtcacgaccgtggagcgaaagttgttgctactggatttgcggatcttggtataatcattttcttcgcatttgttttcaataagttatgcgctatgagcggttcaggctttgacgtggacgttggaccacttttccaaacccctgccgaggcggctcagcaagcagttgacgctgatgtacacgtggttggcgctagcagtcttgctgctggacacttgacgcttgttccacagctcattcaggagttggctaaattgggtagagaggacattattgtggttgctggaggtgtcattccaccacaagactacgatgagctctacaaggccggagtatctctaatctttggacctggaactaggctgccagcctgcgctatgcaagtgttggacaaactggaaggaaatctggagaagcagagcgccaagtcgtga

SEQ ID NO: 226 - DNA, 2379 bp, Ancylostoma ceylanicum
atgctccaaatcaggaaactgctgctgacgcaggtttgcttcgaaagtccggaaaaagtgatagtcggtaggggagaggcactgcgattttcctcggcgtacacaagtggctaccagccgctaccgatcgatccagcatgggcggaaatggcaaagaaagcaatgaaggggaaggatccgaacagtctgatctggcacacacccgaaggcatccccatcaagccactgtacctcaaggatgaccgaaagtgcgatgaaggaaagcccactgagccactgtacctcaaggatgaccgaaagtgcgatgaaggaaagcctactgagttgcccggcaaataccccttcagccgtggaccatatccaacaatgtacacgcagcgaccgtggacgattcgacaatacgccggcttctcaactgtagaggagtccaacaaattctacaaggaaaacatcaaggctggtcagcaaggactttcagtggcctttgacttggccactcatagaggttatgactccgacaacccgcgtgtgtttggtgacgttggtatggctggtgtagctgtagactctgtagaggacatgaaacagctctttgacggaatcgaccttagcaagatgagtgtgtcaatgacaatgaatggagctgtcatcccagttcttgctatgtacatagtcgctgctgaggagtctggtgtcgaccgcaaactactggctggaactattcaaaacgatattctgaaggaattcatggtgcgtaacacttacatctacccaccagatccatcaatgcgtattattggagacattttcgcctacaccagtaaggaaatgcccaaatggaacagcatttcaatttctggatatcacatgcaggaagctggtgccgatgctgttttggagatggccttcaccattgccgacggtatccagtactgcgaaactggtctcaatgctggtctcaccattgatgcattcgcacctcgactaagcttcttctggggtatcggtatgaacttctacatggagattgcaaagatgcgtgctgcacgccgcctttgggccaatctcctcaaggagcgtttccagcccaagagcaacaaatcgctcatgcttcgcactcactcacagactagcggatggtcccttaccgagcaggatccatacaacaacatcatccgtacaactattgaagccatggcttcggtattcggcggaacccagtccctccacaccaactcttttgatgaagctcttggtctgccaactaagttctctgctcgcattgccagaaacactcaaatcatcatccaggaagagagcggtatctgcagagtggctgatccatggggaggatcgtacatgatggagtcactaacggatgagctttatgagaaggctagaaaggtcattgccgaaattgacgaacttggtggtatggccaaagctgtcgcgtctggcatgacaaaactgcgaattgaagaggcagctgcgaagaagcaagctcgaatcgacgctggcaaagacgtcattgttggtgtaaacaagtaccgactcgacaaggaaaccgttgtcgatgtactcaaagtcgacaaccagaaagtacgtgagaaacaaatcgctaaattggaacatatccgtaagacaagggatccacagcgcgccaaggcagcccttgaagctatcacaaagggagctgctggcaaagaaaaccttctcgagttggccgtcgaggcttcgcgagctcgttgcagtgtcggagaaatcagtgatgctatggagaaagtattcacacgttatgctgctatcaacagaatggtgtctggtgcttacaagtcagagtttggagagacgactgaaatggctcaggtgatggaacgtgtaaagcaattcgcagcaaaggaaggtcgtcaaccacgtatcatggtagccaagatgggtcaagacggtcacgaccgtggagcgaaagttgttgctactggatttgcggatcttggtataatcattttcttcgcatttgttttcaataagttatgcgctatgagcggttcaggctttgacgtggacgttggaccacttttccaaacccctgccgaggcggctcagcaagcagttgacgctgatgtacacgtggttggcgctagcagtcttgctgctggacacttgacgcttgttccacagctcattcaggagttggctaaattgggtagagaggacattattgtggttgctggaggtgtcattccaccacaagactacgatgagctctacaaggccggagtatctctaatctttggacctggaactaggctgccagcctgcgctatgcaagtgttggacaaactggaaggaaatctggagaagcagagcgccaagtcgtga

SEQ ID NO: 227 - DNA, 1242 bp, Ancylostoma ceylanicum
atgtcatcgggaagcgaagaggctcagtgtgtcgaggccttcaagcgcatgttgtacacgatgcaaaatgtgcgtcgtacgatcgtggaacgtattctaaacgagtgtgaagtggacgaagctgatgtagatgctctcgacaaagccttacaagagttgacggactcgcgaacatctggagaaatgcgacacatctctacgccagcggccaacttccccatcaatatcagggacgaaattcgtggactacgggatgccgttatattgtccagctcagctccagacacgcgacgcaaagactgcgaatttctgcatcgtctgtcgaaggtcacatctaaatcaccaatgattgagaatgctctggatcagatccagttggatacgattttggctccgtatcatccagaaagtccgaagaaatttgaggaagagctgcaagacgcggaacggtttcttatggatttcgttgattccgcatattcgggtgtaaagccgctgcttgtaacagactgggacggcaccatgaaggactactgctcgcagtacgccacgaatctccagaccaaattagaccttgttatcctttcggaaagcttgcagccagtgtacagtgccgtcgttatgggtcgatttgctgagcttttcacccgagctactgctgtgcttactgctggacctttgaggggtcctggcattttggatctgacagctctgccaataaacggtccagttttgtttagcggttcctggggtcgtgaatggtggctgcgtggacgccgtgttgtacacgaggatggaatctccgaagagggttttgatgcaatcggtcgacttagtgatgagatgaccgatttgctcgaggacagcagcttcgcgcagttcgcgctcgtcggcagcggtgtgcagagaaaggtggatcgcctcactttgggtgtgcaaaccgtatttggtcatgtacctctcgaactggtcgtgagatacattgacgctatcaaggagagaattcatcgtgttgatccgaacaatgctaatctcgtcttggagaactcttcgcccttggagattgaggtctgtgcgcataattcaggagctgtatggaataaaggtgatggggtggcatcattgattgaatctctacacgattcattgaaaaatggaaaagttttggtggctggtgacaccacaagtgatctgccgatgcttcaacatgcagtttccgagaatccagatgtgagtccatga

SEQ ID NO: 228 - DNA, 1386 bp, Ancylostoma ceylanicum
atgtcatcgggaagcgaagaggctcagtgtgtcgaggccttcaagcgcatgttgtacacgatgcaaaatgtgcgtcgtacgatcgtggaacgtattctaaacgagtgtgaagtggacgaagctgatgtagatgctctcgacaaagccttacaagagttgacggactcgcgaacatctggagaaatgcgacacatctctacgccagcggccaacttccccatcaatatcagggacgaaattcgtggactacgggatgccgttatattgtccagctcagctccagacacgcgacgcaaagactgcgaatttctgcatcgtctgtcgaaggtcacatctaaatcaccaatgattgagaatgctctggatcagatccagttggatacgattttggctccgtatcatccagaaagtccgaagaaatttgaggaagagctgcaagacgcggaacggtttcttatggatttcgttgattccgcatattcgggtgtaaagccgctgcttgtaacagactgggacggcaccatgaaggactactgctcgcagtacgccacgaatctccagaccaaattagaccttgttatcctttcggaaagcttgcagccagtgtacagtgccgtcgttatgggtcgatttgctgagcttttcacccgagctactgctgtgcttactgctggacctttgaggggtcctggcattttggatctgacagctctgccaataaacggtccagttttgtttagcggttcctggggtcgtgaatggtggctgcgtggacgccgtgttgtacacgaggatggaatctccgaagagggttttgatgcaatcggtcgacttagtgatgagatgaccgatttgctcgaggacagcagcttcgcgcagttcgcgctcgtcggcagcggtgtgcagagaaaggtggatcgcctcactttgggtgtgcaaaccgtatttggtcatgtacctctcgaactggtcgtgagatacattgacgctatcaaggagagaattcatcgtgttgatccgaacaatgctaatctcgtcttggagaactcttcgcccttggagattgaggtctgtgcgcataattcaggagctgtatggaataaaggtgatggggtggcatcattgattgaatctctacacgattcattgaaaaatggaaaagttttggtggctggtgacaccacaagtgatctgccgatgcttcaacatgcagtttccgagaatccagatggtgtcatggcactattcgttggtgctggcgaatcgttacgtgagtccgtacaatcgattgtcggcgatgaatccagagtctgttttgtgtcttgtccggatgtggtgcacgcggcttttgcccgtgtactggccgccaaagttgagttggactag

SEQ ID NO: 229 - DNA, 1287 bp, Ancylostoma ceylanicum
atgcaaaatgtgcgtcgtacgatcgtggaacgtattctaaacgagtgtgaagtggacgaagctgatgtagatgctctcgacaaagccttacaagagttgacggactcgcgaacatctggagaaatgcgacacatctctacgccagcggccaacttccccatcaatatcagggacgaaattcgtggactacgggatgccgttatattgtccagctcagctccagacacgcgacgcaaagactgcgaatttctgcatcgtctgtcgaaggtcacatctaaatcaccaatgattgagaatgctctggatcagatccagttggatacgattttggctccgtatcatccagaaagtccgaagaaatttgaggaagagctgcaagacgcggaacggtttcttatggatttcgttgattccgcatattcgggtgtaaagccgctgcttgtaacagactgggacggcaccatgaaggactactgctcgcagtacgccacgaatctccagccagtgtacagtgccgtcgttatgggtcgatttgctgagcttttcacccgagctactgctgtgcttactgctggacctttgaggggtcctggcattttggatctgacagctctgccaataaacggtccagttttgtttagcggttcctggggtcgtgaatggtggctgcgtggacgccgtgttgtacacgaggatggaatctccgaagagggttttgatgcaatcggtcgacttagtgatgagatgaccgatttgctcgaggacagcagcttcgcgcagttcgcgctcgtcggcagcggtgtgcagagaaaggtggatcgcctcactttgggtgtgcaaaccgtatttggtcatgtacctctcgaactggtcgtgagatacattgacgctatcaaggagagaattcatcgtgttgatccgaacaatgctaatctcgtcttggagaactcttcgcccttggagattgaggtctgtgcgcataattcaggagctgtatggaataaaggtgatggggtggcatcattgattgaatctctacacgattcattgaaaaatggaaaagttttggtggctggtgacaccacaagtgatctgccgatgcttcaacatgcagtttccgagaatccagatggtgtcatggcactattcgttggtgctggcgaatcgttacgtgagtccgtacaatcgattgtcggcgatgaatccagagtctgttttgtgtcttgtccggatgtggtgcacgcggcttttgcccgtgtactggccgccaaagttgagttggactag

SEQ ID NO: 230 - DNA, 1332 bp, Ancylostoma ceylanicum
atgcctgtgttagctagcgcgtcgtcactgcgcgatagcacggaaggcagctgtgttcgtgactgcgattccggcttcttcgaagggaggatgtcatcgggaagcgaagaggctcagtgtgtcgaggccttcaagcgcatgttgtacacgatgcaaaatgtgcgtcgtacgatcgtggaacgtattctaaacgagtgtgaagtggacgaagctgatgtagatgctctcgacaaagccttacaagagttgacggactcgcgaacatctggagaaatgcgacacatctctacgccagcggccaacttccccatcaatatcagggacgaaattcgtggactacgggatgccgttatattgtccagctcagctccagacacgcgacgcaaagactgcgaatttctgcatcgtctgtcgaaggtcacatctaaatcaccaatgattgagaatgctctggatcagatccagttggatacgattttggctccgtatcatccagaaagtccgaagaaatttgaggaagagctgcaagacgcggaacggtttcttatggatttcgttgattccgcatattcgggtgtaaagccgctgcttgtaacagactgggacggcaccatgaaggactactgctcgcagtacgccacgaatctccagaccaaattagaccttgttatcctttcggaaagcttgcagccagtgtacagtgccgtcgttatgggtcgatttgctgagcttttcacccgagctactgctgtgcttactgctggacctttgaggggtcctggcattttggatctgacagctctgccaataaacggtccagttttgtttagcggttcctggggtcgtgaatggtggctgcgtggacgccgtgttgtacacgaggatggaatctccgaagagggttttgatgcaatcggtcgacttagtgatgagatgaccgatttgctcgaggacagcagcttcgcgcagttcgcgctcgtcggcagcggtgtgcagagaaaggtggatcgcctcactttgggtgtgcaaaccgtatttggtcatgtacctctcgaactggtcgtgagatacattgacgctatcaaggagagaattcatcgtgttgatccgaacaatgctaatctcgtcttggagaactcttcgcccttggagattgaggtctgtgcgcataattcaggagctgtatggaataaaggtgatggggtggcatcattgattgaatctctacacgattcattgaaaaatggaaaagttttggtggctggtgacaccacaagtgatctgccgatgcttcaacatgcagtttccgagaatccagatgtgagtccatga

SEQ ID NO: 231 - DNA, 1476 bp, Ancylostoma ceylanicum
atgcctgtgttagctagcgcgtcgtcactgcgcgatagcacggaaggcagctgtgttcgtgactgcgattccggcttcttcgaagggaggatgtcatcgggaagcgaagaggctcagtgtgtcgaggccttcaagcgcatgttgtacacgatgcaaaatgtgcgtcgtacgatcgtggaacgtattctaaacgagtgtgaagtggacgaagctgatgtagatgctctcgacaaagccttacaagagttgacggactcgcgaacatctggagaaatgcgacacatctctacgccagcggccaacttccccatcaatatcagggacgaaattcgtggactacgggatgccgttatattgtccagctcagctccagacacgcgacgcaaagactgcgaatttctgcatcgtctgtcgaaggtcacatctaaatcaccaatgattgagaatgctctggatcagatccagttggatacgattttggctccgtatcatccagaaagtccgaagaaatttgaggaagagctgcaagacgcggaacggtttcttatggatttcgttgattccgcatattcgggtgtaaagccgctgcttgtaacagactgggacggcaccatgaaggactactgctcgcagtacgccacgaatctccagaccaaattagaccttgttatcctttcggaaagcttgcagccagtgtacagtgccgtcgttatgggtcgatttgctgagcttttcacccgagctactgctgtgcttactgctggacctttgaggggtcctggcattttggatctgacagctctgccaataaacggtccagttttgtttagcggttcctggggtcgtgaatggtggctgcgtggacgccgtgttgtacacgaggatggaatctccgaagagggttttgatgcaatcggtcgacttagtgatgagatgaccgatttgctcgaggacagcagcttcgcgcagttcgcgctcgtcggcagcggtgtgcagagaaaggtggatcgcctcactttgggtgtgcaaaccgtatttggtcatgtacctctcgaactggtcgtgagatacattgacgctatcaaggagagaattcatcgtgttgatccgaacaatgctaatctcgtcttggagaactcttcgcccttggagattgaggtctgtgcgcataattcaggagctgtatggaataaaggtgatggggtggcatcattgattgaatctctacacgattcattgaaaaatggaaaagttttggtggctggtgacaccacaagtgatctgccgatgcttcaacatgcagtttccgagaatccagatggtgtcatggcactattcgttggtgctggcgaatcgttacgtgagtccgtacaatcgattgtcggcgatgaatccagagtctgttttgtgtcttgtccggatgtggtgcacgcggcttttgcccgtgtactggccgccaaagttgagttggactag

SEQ ID NO: 232 - DNA, 1938 bp, Ancylostoma ceylanicum
atgttatcggtggcgaggcgcggtgtcggaagcctgctgtcacgtcgcgcttacgctctttctgcgcacacaaccgacgtgaaacgtggaaacatcgccaactacaaagtcgtcgaccatgcatacgatgctgtcgtcgttggtgcaggaggcgcgggcctacgtgctgcaatgggattgtcggaaggtggtctaaaaactgctgtcatcactaagatcttccccacgcgatcgcacactgtcgctgctcaaggtggtgtcaatgcagctctaggaagcatgaataaggatgactggcgctggcatttctacgacactgtgaagggatctgactggctcggagatcaggatgccatccactacatgactcgagaggcctgccgagctgtcatcgaattagaaaactatggtatgcccttctctcgaacacctgagggtaagatttaccaacgtgctttcggaggacagtccaacgattatggtcgtggtggacaagctcacagaacatgtgcggtagcggatcgtaccggtcactcgcttcttcacaccctctacggagcttcgttgcagtataactgcaactactttgtagagtacttcgctctcgatctcatcatggacaagggtgcttgcgtaggtgtagttgccatgtgtctggaggatggaacgattcatcgattccgctcgaagaacactgtgttggccaccggaggattcgggcgagcttacttctcatgcacttctgctcacacttgcaccggagatggtactgccatggttgctcgtgccggtatcaacaacaccgatatggaattcgtccagttccatcccactggcatctatggcgctggctgtctaatcactgaaggatctcgaggagaaggagggtatcttgtgaactccaagggagaacggttcatggaacgatatgcgccaaacgcaaaggatctggcttcacgtgatgttgtatctcgtgccatgaccgttgaagtgatggaaggacgtggtgttggcccggaaaaagatcacattttcttgcaactgcatcaccttcccgctcagcagctcgctgaaagactgcctggtatctcagaaactgccatgatctttgctgacgttgacgttaccaaggagccgattcctgtcattcctactgtacattattgcatgggtggaattccaacgaactacaagggagaggtgctctcctactcgaaggaaaagggtgatcaggttgttcctggactttacgctgcgggtgaatgttctgcacagtctgtgcacggtgcaaaccgattgggcgccaactcactgctagacattgtgatcttcggacgagctgccgctttgagcattctcaaacacactaagcctggtgtcggtgttccggatctaccaaagaatgcgggagagtcatctgttgataacattgatgccttgaggaataggaaagatggtccatccactgccaaggtccgacttaatctgcaaaagaccatgcagaagcacgctgccgtattcagaagaggagatgtccttcaggaaggtgtcaagaaagtggaggatatctacaaggattacaacaagctgaccgtgcaggacaagagtttgatttggaacagcgatttgattgagaccctcgaactgcagaatcttctcatcaatgccatgcaaaccattgttgcagcagaggctaggaaggaatcacgtggtgcccatgcacgtgacgatttccctacccgtatcgacgaatttgactatagcaagccgttggatggtcagaagaagaagccacttgaggagcactggcgtaaacacaccatgattacctcgaacatcgacaccggcaaggtgaaactcgactaccgtccagtcatagacaccactcttgacaagagcgagacagactggatcccaccaaagatccgttcttactga

SEQ ID NO: 233 - DNA, 2046 bp, Ancylostoma ceylanicum
atgttatcggtggcgaggcgcggtgtcggaagcctgctgtcacgtcgcgcttacgctctttctgcgcacacaaccgacgtgaaacgtggaaacatcgccaactacaaagtcgtcgaccatgcatacgatgctgtcgtcgttggtgcaggaggcgcgggcctacgtgctgcaatgggattgtcggaaggtggtctaaaaactgctgtcatcactaagatcttccccacgcgatcgcacactgtcgctgctcaaggtggtgtcaatgcagctctaggaagcatgaataaggatgactggcgctggcatttctacgacactgtgaagggatctgactggctcggagatcaggatgccatccactacatgactcgagaggcctgccgagctgtcatcgaattagaaaactatggtatgcccttctctcgaacacctgagggtaagatttaccaacgtgctttcggaggacagtccaacgattatggtcgtggtggacaagctcacagaacatgtgcggtagcggatcgtaccggtcactcgcttcttcacaccctctacggagcttcgttgcagtataactgcaactactttgtagagtacttcgctctcgatctcatcatggacaagggtgcttgcgtaggtgtagttgccatgtgtctggaggatggaacgattcatcgattccgctcgaagaacactgtgttggccaccggaggattcgggcgagcttacttctcatgcacttctgctcacacttgcaccggagatggtactgccatggttgctcgtgccggtatcaacaacaccgatatggaattcgtccagttccatcccactggcatctatggcgctggctgtctaatcactgaaggatctcgaggagaaggagggtatcttgtgaactccaagggagaacggttcatggaacgatatgcgccaaacgcaaaggatctggcttcacgtgatgttgtatctcgtgccatgaccgttgaagtgatggaaggacgtggtgttggcccggaaaaagatcacattttcttgcaactgcatcaccttcccgctcagcagctcgctgaaagactgcctggtatctcagaaactgccatgatctttgctgacgttgacgttaccaaggagccgattcctgtcattcctactgtacattattgcatgggtggaattccaacgaactacaagggagaggtgctctcctactcgaaggaaaagggtgatcaggttgttcctggactttacgctgcgggtgaatgttctgcacagtctgtgcacggtgcaaaccgattgggcgccaactcactgctagacattgtgatcttcggacgagctgccgctttgagcattctcaaacacactaagcctggtgtcggtgttccggatctaccaaagaatgcgggagagtcatctgttgataacattgatgccttgaggaataggaaagatggtccatccactgccaaggtccgacttaatctgcaaaagaccatgcagaagcacgctgccgtattcagaagaggagatgtccttcaggaaggtgtcaagaaagtggaggatatctacaaggattacaacaagctgaccgtgcaggacaagagtttgatttggaacagcgatttgattgagaccctcgaactgcagaatcttctcatcaatgccatgcaaaccattgttgcagcagaggctaggaaggaatcacgtggtgcccatgcacgtgacgatttccctacccgtatcgacgaatttgactatagcaagccgttggatggtcagaagaagaagccacttgagatataccaagtagcgacagcattccacttattttctatgttaacacattcgcgaccttacgctttcggcatggtgtgccacgtgggacacgagcggtcccttaagcacgagcactggcgtaaacacaccatgattacctcgaacatcgacaccggcaaggtgaaactcgactaccgtccagtcatagacaccactcttgacaagagcgagacagactggatcccaccaaagatccgttcttactga

SEQ ID NO: 234 - DNA, 618 bp, Ancylostoma ceylanicum
  modified_base (11)..(11): a, c, t, g, unknown or other
atgttggctcnaccaacacaagatctgatcaacgtgtacgacaagtgggggcacggaggcttcggaatgattctgaccggaaatgtgatggtggatccgaacgaatgtgatgtcactgaaggaataacccttgaggaactactgcacaagcacggcccttttccgctcgaggaacatatcgccgctggaattttgcgaaatgttagctcagctgtcatgttccttcacagcagagaggtcatccatggtagtttggatttcaattccgtagttgttgactcacatttcaatgcgaaaacaataattacgacaacagtgcaccatgcgaaacatgcagcatcaggggttaaagcaaaagttgaagacgtgtttcacgttggattactgctgtaccgcatgctgaccggtcgaaaggctgagtttggtaagaaaggagagctgattggtggaaatagtccctacctacgagtgtcagaaaaaggtcttaaactggctgaattcatgttgacaaaaagtacaaggttcccacctacaatcggtcgcgttcgctacagcgaatggctggaagagtgcgaagaaaatccaccggtgttcgttctttttccagactatgcatga

SEQ ID NO: 235 - DNA, 1374 bp, Ancylostoma ceylanicum
atgtgcggcatcatagggatggtgcaggcagacggcgtcgaagtggatggtgcgcttcccgtgctagcggcagacggattgacagcgcttcagcacagaggaacagaatcagctgggctggtaggctcaaacggcgtcgatcgagatcacctcgagatcatcaaaggccacggtttggtccgagatgtatttctggaggagaacctcagcaaattgaatggttccagaattattattggtcataaccgatattccactgctggtgggaaacgaaaggcgatcaactgtgtacagccattcgtcgtgtacactgcaataggaacagtagccatctcccataatggagaattggtggatgcgaagaaaaaacggaaggaggctctacatcaaggcgtcgggctctccacggacaccgactctgaactaatcgcgcagatggttgcgaaggcgatagcgttgaattacaagtgtagaaacgatgaaaactggggcgatatctctaaggaacttgccgtgacaatgtcagcaatcaatatgtcatactcattactagtaatgacgtatgatcgcctatatgctatacgagacccttatggaaacaggccactatgtgttggaactatctatgatgcagaaaacgcgatccagactcctgtggcgtattgcgcggcgtcggagtcgtgtgcacttcctgggacggcgaagttggattttgaggttgaaccaggagagatcgttgagatctcacgtaaagggatacgatcggtgtttcagatgaagccccaaacaccacaagccgcgtgcatctttgaatatgtgtattttgccagaaacgattcgatcattgaaggccaacaggtccaagcagtaagggaagaatgcggcagaatcctagccacagaaagtcatgccgatgcagatataatttcgaatgtgccggactcatcaacagcagcagctattggctatgcagctcagtctggtgttccttatgaaccctgctttcatcgaaacagctatgttggacgatcgtttatacaaccgagcaatgctatgcgacagtcagcgattcacaagaaattcggtgtgattcgaaaaaatgtcgaaggccggcgtatagtgctgatagatgactcaatagttcgtggaaataccatgagaatactcgtacagatgttattgaacgccggagccaaagaggttcatctacgaatcgcttcgccgccggtgaaattcccctgcttcatgggtataaatatacctactagggaggaattactagcgagtaataagaatttggaccagatcactcaccattttggcgcaacatcagtggcgtatttgtccgtggaagggctacaaaaggtactgtag

SEQ ID NO: 236 - DNA, 1356 bp, Ancylostoma ceylanicum
atggtgcaggcagacggcgtcgaagtggatggtgcgcttcccgtgctagcggcagacggattgacagcgcttcagcacagaggaacagaatcagctgggctggtaggctcaaacggcgtcgatcgagatcacctcgagatcatcaaaggccacggtttggtccgagatgtatttctggaggagaacctcagcaaattgaatggttccagaattattattggtcataaccgatattccactgctggtgggaaacgaaaggcgatcaactgtgtacagccattcgtcgtgtacactgcaataggaacagtagccatctcccataatggagaattggtggatgcgaagaaaaaacggaaggaggctctacatcaaggcgtcgggctctccacggacaccgactctgaactaatcgcgcagatggttgcgaaggcgatagcgttgaattacaagtgtagaaacgatgaaaactggggcgatatctctaaggaacttgccgtgacaatgtcagcaatcaatatgtcatactcattactagtaatgacgtatgatcgcctatatgctatacgagacccttatggaaacaggccactatgtgttggaactatctatgatgcagaaaacgcgatccagactcctgtggcgtattgcgcggcgtcggagtcgtgtgcacttcctgggacggcgaagttggattttgaggttgaaccaggagagatcgttgagatctcacgtaaagggatacgatcggtgtttcagatgaagccccaaacaccacaagccgcgtgcatctttgaatatgtgtattttgccagaaacgattcgatcattgaaggccaacaggtccaagcagtaagggaagaatgcggcagaatcctagccacagaaagtcatgccgatgcagatataatttcgaatgtgccggactcatcaacagcagcagctattggctatgcagctcagtctggtgttccttatgaaccctgctttcatcgaaacagctatgttggacgatcgtttatacaaccgagcaatgctatgcgacagtcagcgattcacaagaaattcggtgtgattcgaaaaaatgtcgaaggccggcgtatagtgctgatagatgactcaatagttcgtggaaataccatgagaatactcgtacagatgttattgaacgccggagccaaagaggttcatctacgaatcgcttcgccgccggtgaaattcccctgcttcatgggtataaatatacctactagggaggaattactagcgagtaataagaatttggaccagatcactcaccattttggcgcaacatcagtggcgtatttgtccgtggaagggctacaaaaggtactgtag

SEQ ID NO: 237 - DNA, 1461 bp, Ancylostoma ceylanicum
atgtgcggcatcatagggatggtgcaggcagacggcgtcgaagtggatggtgcgcttcccgtgctagcggcagacggattgacagcgcttcagcacagaggaacagaatcagctgggctggtaggctcaaacggcgtcgatcgagatcacctcgagatcatcaaaggccacggtttggtccgagatgtatttctggaggagaacctcagcaaattgaatggttccagaattattattggtcataaccgatattccactgctggtgggaaacgaaaggcgatcaactgtgtacagccattcgtcgtgtacactgcaataggaacagtagccatctcccataatggagaattggtggatgcgaagaaaaaacggaaggaggctctacatcaaggcgtcgggctctccacggacaccgactctgaactaatcgcgcagatggttgcgaaggcgatagcgttgaattacaagtgtagaaacgatgaaaactggggcgatatctctaaggaacttgccgtgacaatgtcagcaatcaatatgtcatactcattactagtaatgacgtatgatcgcctatatgctatacgagacccttatggaaacaggccactatgtgttggaactatctatgatgcagaaaacgcgatccagactcctgtggcgtattgcgcggcgtcggagtcgtgtgcacttcctgggacggcgaagttggattttgaggttgaaccaggagagatcgttgagatctcacgtaaagggatacgatcggtgtttcagatgaagccccaaacaccacaagccgcgtgcatctttgaatatgtgtattttgccagaaacgattcgatcattgaaggccaacaggtccaagcagtaagggaagaatgcggcagaatcctagccacagaaagtcatgccgatgcagatataatttcgaatgtgccggactcatcaacagcagcagctattggctatgcagctcagtctggtgttccttatgaaccctgctttcatcgaaacagctatgttggacgatcgtttatacaaccgagcaatgctatgcgacagtcagcgattcacaagaaattcggtgtgattcgaaaaaatgtcgaaggccggcgtatagtgctgatagatgactcaatagttcgtggaaataccatgagaatactcgtacagatgttattgaacgccggagccaaagaggttcatctacgaatcgcttcgccgccggtgaaattcccctgcttcatgggtataaatatacctactagggaggaattactagcgagtaataagaatttggaccagatcactcaccattttggcgcaacatcagtggcgtatttgtccgtggaagggctacaaaaggcagtacaatccggaatcgagcgacgggcgaatttcgacgttgggcattgcaccgcttgccttaccgggaagtacccagtgccgatcgacttttag

SEQ ID NO: 238 - DNA, 1443 bp, Ancylostoma ceylanicum
atggtgcaggcagacggcgtcgaagtggatggtgcgcttcccgtgctagcggcagacggattgacagcgcttcagcacagaggaacagaatcagctgggctggtaggctcaaacggcgtcgatcgagatcacctcgagatcatcaaaggccacggtttggtccgagatgtatttctggaggagaacctcagcaaattgaatggttccagaattattattggtcataaccgatattccactgctggtgggaaacgaaaggcgatcaactgtgtacagccattcgtcgtgtacactgcaataggaacagtagccatctcccataatggagaattggtggatgcgaagaaaaaacggaaggaggctctacatcaaggcgtcgggctctccacggacaccgactctgaactaatcgcgcagatggttgcgaaggcgatagcgttgaattacaagtgtagaaacgatgaaaactggggcgatatctctaaggaacttgccgtgacaatgtcagcaatcaatatgtcatactcattactagtaatgacgtatgatcgcctatatgctatacgagacccttatggaaacaggccactatgtgttggaactatctatgatgcagaaaacgcgatccagactcctgtggcgtattgcgcggcgtcggagtcgtgtgcacttcctgggacggcgaagttggattttgaggttgaaccaggagagatcgttgagatctcacgtaaagggatacgatcggtgtttcagatgaagccccaaacaccacaagccgcgtgcatctttgaatatgtgtattttgccagaaacgattcgatcattgaaggccaacaggtccaagcagtaagggaagaatgcggcagaatcctagccacagaaagtcatgccgatgcagatataatttcgaatgtgccggactcatcaacagcagcagctattggctatgcagctcagtctggtgttccttatgaaccctgctttcatcgaaacagctatgttggacgatcgtttatacaaccgagcaatgctatgcgacagtcagcgattcacaagaaattcggtgtgattcgaaaaaatgtcgaaggccggcgtatagtgctgatagatgactcaatagttcgtggaaataccatgagaatactcgtacagatgttattgaacgccggagccaaagaggttcatctacgaatcgcttcgccgccggtgaaattcccctgcttcatgggtataaatatacctactagggaggaattactagcgagtaataagaatttggaccagatcactcaccattttggcgcaacatcagtggcgtatttgtccgtggaagggctacaaaaggcagtacaatccggaatcgagcgacgggcgaatttcgacgttgggcattgcaccgcttgccttaccgggaagtacccagtgccgatcgacttttag

SEQ ID NO: 239 - DNA, 573 bp, Ancylostoma ceylanicum
atgatggaatgctccgaatcgttgaatatggacatgcagtacagtactcactgtggaatcgcgcacactcgatgggccacacatggatccccaaaggacgtcaacagccacccacagagaagcaatgaaaagaatgaattcatggttgtccacaacggaatcatcactaactatcgtgagatcaaggagtacttgaagaagaaggggcacaattttgagtcagagacggacacagaagtgattgcgaagcttgcacaacacatccacaatctctatccggatttctcgtttcgtcaggtggtcgaagtagtcatccaacagctggaaggagcatttgcactagcctttaaatcctccaaattccccggtcagctggtggctactcgccgaggatctcctctactggttggcatcaagagcaatagccgcttacagactaactactttccagttctactgagccgcggtggatcctgtttgtcatgggctgatgagcatagacctttggaagagggtaaatatcctattttatggaattggattttatgtctccaccatgcagagaattgctaa

SEQ ID NO: 240 - DNA, 843 bp, Ancylostoma ceylanicum
atgaattcaagttgctcacaagctctgggtcgaagcctttctagcgaagaagtagtgaagaagatctgctttgcaagtggatgtgatgttggttcgcagccaatctccggagatgcggccatccctgatcaggaatacctggatcagctcatccgcgacaaaagtgaccttcgctcggttcatgcagctccgttccgccatttgagcagactgattgatagagagatcgcccgcgtcgttgccgctatgtccgcccaggtgcatgtcgacgacgacgtcgctgaagaagagcgtggagaaaaagtctgcctaaccgagatgattcttgttccggtggaccgttatcctaggtacaatttcgttggacgcattctgggtcctcgtgggatgaccgccaaacaactggaggaagacactggatgcaagattatggttcgaggacggggttcaagccgcatgagtggttcgagacgcgaacgcagcaacgacactgagccgcttcatgtgctcattcaatgcgaagactacgagaagagagctcagcagaagatgcgaaatgctgtggaggcgatcaatcagctactgcaccctcctccagaaggcaaagacgagctgaagcgcaagcaactgattgagctatcaatcataaacggcacctaccgtccaacgtctgccactaagagtgcgatgcgtaacaccgaatccacaagaccctcgtcgccagcgcattttccggcagcggtagaaaactcgtcctacaccgaacaagcccgtcttctttcacagtttgcagaagctgccaaacagggcaaaaagaagtacgtaatttcatcttacagctga

SEQ ID NO: 241 - DNA, 876 bp, Ancylostoma ceylanicum
atgaattcaagttgctcacaagctctgggtcgagtaagttccagattcgatcagagagcctgttctagcctttctagcgaagaagtagtgaagaagatctgctttgcaagtggatgtgatgttggttcgcagccaatctccggagatgcggccatccctgatcaggaatacctggatcagctcatccgcgacaaaagtgaccttcgctcggttcatgcagctccgttccgccatttgagcagactgattgatagagagatcgcccgcgtcgttgccgctatgtccgcccaggtgcatgtcgacgacgacgtcgctgaagaagagcgtggagaaaaagtctgcctaaccgagatgattcttgttccggtggaccgttatcctaggtacaatttcgttggacgcattctgggtcctcgtgggatgaccgccaaacaactggaggaagacactggatgcaagattatggttcgaggacggggttcaagccgcatgagtggttcgagacgcgaacgcagcaacgacactgagccgcttcatgtgctcattcaatgcgaagactacgagaagagagctcagcagaagatgcgaaatgctgtggaggcgatcaatcagctactgcaccctcctccagaaggcaaagacgagctgaagcgcaagcaactgattgagctatcaatcataaacggcacctaccgtccaacgtctgccactaagagtgcgatgcgtaacaccgaatccacaagaccctcgtcgccagcgcattttccggcagcggtagaaaactcgtcctacaccgaacaagcccgtcttctttcacagtttgcagaagctgccaaacagggcaaaaagaagtacgtaatttcatcttacagctga

SEQ ID NO: 242 - DNA, 837 bp, Ancylostoma ceylanicum
atgagaccaccgcgcggctgtcagaagagcctttctagcgaagaagtagtgaagaagatctgctttgcaagtggatgtgatgttggttcgcagccaatctccggagatgcggccatccctgatcaggaatacctggatcagctcatccgcgacaaaagtgaccttcgctcggttcatgcagctccgttccgccatttgagcagactgattgatagagagatcgcccgcgtcgttgccgctatgtccgcccaggtgcatgtcgacgacgacgtcgctgaagaagagcgtggagaaaaagtctgcctaaccgagatgattcttgttccggtggaccgttatcctaggtacaatttcgttggacgcattctgggtcctcgtgggatgaccgccaaacaactggaggaagacactggatgcaagattatggttcgaggacggggttcaagccgcatgagtggttcgagacgcgaacgcagcaacgacactgagccgcttcatgtgctcattcaatgcgaagactacgagaagagagctcagcagaagatgcgaaatgctgtggaggcgatcaatcagctactgcaccctcctccagaaggcaaagacgagctgaagcgcaagcaactgattgagctatcaatcataaacggcacctaccgtccaacgtctgccactaagagtgcgatgcgtaacaccgaatccacaagaccctcgtcgccagcgcattttccggcagcggtagaaaactcgtcctacaccgaacaagcccgtcttctttcacagtttgcagaagctgccaaacagggcaaaaagaagtacgtaatttcatcttacagctga

SEQ ID NO: 243 - DNA, 504 bp, Ancylostoma ceylanicum
atggatgccgatgcgatttttgtgatgggcgtgagcggatgcggtaaaaccaccataggtggtcagctggcgaatcgtctcgggtggaactacaaggatgcagatgacttccattcagaagctaatgtggccaaaatgagcgcaggaatccctctcaacgacgccgatcggcggccatggttactagagataaacaattactgtaaatcgcatccgaaaactattgtgggttgttctgcactgaagaagcagtatcgtgacatcttgagggataagatccactgtagattcgtatttttggatgtgagcaggaaagaactggaacgacgcttgacggaaaggaagaaccactacatgccggttagcttactcgacagccaactggcgacattagagcggcccggcgaggatgaggatgtggtgacggtccgcatcaaggatgaggctccgactgaccttatcgaaataatagtgaatcaactaaacaaggaaacctctcactag

SEQ ID NO: 244 - DNA, 534 bp, Ancylostoma ceylanicum
atgtcacgtatgggaaaagcggtattgattatggatgccgatgcgatttttgtgatgggcgtgagcggatgcggtaaaaccaccataggtggtcagctggcgaatcgtctcgggtggaactacaaggatgcagatgacttccattcagaagctaatgtggccaaaatgagcgcaggaatccctctcaacgacgccgatcggcggccatggttactagagataaacaattactgtaaatcgcatccgaaaactattgtgggttgttctgcactgaagaagcagtatcgtgacatcttgagggataagatccactgtagattcgtatttttggatgtgagcaggaaagaactggaacgacgcttgacggaaaggaagaaccactacatgccggttagcttactcgacagccaactggcgacattagagcggcccggcgaggatgaggatgtggtgacggtccgcatcaaggatgaggctccgactgaccttatcgaaataatagtgaatcaactaaacaaggaaacctctcactag

SEQ ID NO: 245 - DNA, 549 bp, Ancylostoma ceylanicum
atgtcacgtatgggaaaagcggttagtgtataccaggtattgattatggatgccgatgcgatttttgtgatgggcgtgagcggatgcggtaaaaccaccataggtggtcagctggcgaatcgtctcgggtggaactacaaggatgcagatgacttccattcagaagctaatgtggccaaaatgagcgcaggaatccctctcaacgacgccgatcggcggccatggttactagagataaacaattactgtaaatcgcatccgaaaactattgtgggttgttctgcactgaagaagcagtatcgtgacatcttgagggataagatccactgtagattcgtatttttggatgtgagcaggaaagaactggaacgacgcttgacggaaaggaagaaccactacatgccggttagcttactcgacagccaactggcgacattagagcggcccggcgaggatgaggatgtggtgacggtccgcatcaaggatgaggctccgactgaccttatcgaaataatagtgaatcaactaaacaaggaaacctctcactag

SEQ ID NO: 246 - DNA, 525 bp, Ancylostoma ceylanicum
atgggaaaagcggtattgattatggatgccgatgcgatttttgtgatgggcgtgagcggatgcggtaaaaccaccataggtggtcagctggcgaatcgtctcgggtggaactacaaggatgcagatgacttccattcagaagctaatgtggccaaaatgagcgcaggaatccctctcaacgacgccgatcggcggccatggttactagagataaacaattactgtaaatcgcatccgaaaactattgtgggttgttctgcactgaagaagcagtatcgtgacatcttgagggataagatccactgtagattcgtatttttggatgtgagcaggaaagaactggaacgacgcttgacggaaaggaagaaccactacatgccggttagcttactcgacagccaactggcgacattagagcggcccggcgaggatgaggatgtggtgacggtccgcatcaaggatgaggctccgactgaccttatcgaaataatagtgaatcaactaaacaaggaaacctctcactag

SEQ ID NO: 247 - DNA, 1428 bp, Ancylostoma ceylanicum
atgactgcaggctttggattgctcgaatctggacgggtctcatcaaaagacgaggtaaatgtgatggtgaaaaacgttgtcgacgtcatattcggaggtctcgcttactggatgttcgggtatggattcacttttggcgagaagtttattaatcctttcattggaataggcgactattttttcgatcctgaacgagaggacggatccactccagacaaggctggtacatcgtatgcgttgtttctgttccaaatgagtttcgctaccacaacatcgaccatcgtttcagctggcatggcagagcgtattcatctacaatcgcactgcttcgtctcttttttcatcactttggtgcactcagtggctggacactgggtttggcatcgcaccggggtgttcaggaccatgggcgtgatcgattcggctggctgtagtgcggtacatctcgtcgggggcatgtctggtcttgtagcaactctttacctaaaaccgcgacaacaccgtttcaaggacaaaagagctcgacaaatcagcgatcctacaaaggctatattgggattcctcatgatctggtggggttggctggcgttcaacactgcatcaaactattctgtgtctcgatatcagtggactgagggaatgcgatcagccgtcggcacaatcatggcgtcagctggtggtgggacggtgacggtgctgatctcacggtggacaacgaagaaaatccaggtggatatgttgatcgacggaatgctcgcttcactagtatccagtacagctggctgcctgttcttcaccccatggcaggcgacactggttggtgcgattgggtcagctatggcgctgctgatttacccgctgttggagaaggcacagatagatgatccagtgggagttgttcctgttcacgtggttggctcagtctggggtatgatcagtccagctatcttcgtctgtagagattttggcctcgaggaccatcaggtcaccaacgagaacgatctctccggtgtgctctacgggggcggagtgacgctgcttctctaccagcttgctgctctaggagcgatcgcgtttttcagtgggacttgcgccttcgctatcttatttatcctacaacattctccaataggactacgcctgtctcgtctggatgaggagcttggtgctgatctcagagaacatggccttgctggtgtcaacgtcatgacgtacaccatcgaaaagaaactcacagcagaaaacctgagcgccgttctgatggtgatcgttcgatggcgtgctaaggcaaagctcggagcgttgcgacgacgtcggattgccgacatgcatccgacggagacggagctgggcgtcgagatgatgcgcctgcagaaacgacgagccacattgacccgtcttcaacaggctgtcaatcagggccagtga

SEQ ID NO: 248 - DNA, 1458 bp, Ancylostoma ceylanicum
atgactgcttcaagttttactatattcactatgactgcaggctttggattgctcgaatctggacgggtctcatcaaaagacgaggtaaatgtgatggtgaaaaacgttgtcgacgtcatattcggaggtctcgcttactggatgttcgggtatggattcacttttggcgagaagtttattaatcctttcattggaataggcgactattttttcgatcctgaacgagaggacggatccactccagacaaggctggtacatcgtatgcgttgtttctgttccaaatgagtttcgctaccacaacatcgaccatcgtttcagctggcatggcagagcgtattcatctacaatcgcactgcttcgtctcttttttcatcactttggtgcactcagtggctggacactgggtttggcatcgcaccggggtgttcaggaccatgggcgtgatcgattcggctggctgtagtgcggtacatctcgtcgggggcatgtctggtcttgtagcaactctttacctaaaaccgcgacaacaccgtttcaaggacaaaagagctcgacaaatcagcgatcctacaaaggctatattgggattcctcatgatctggtggggttggctggcgttcaacactgcatcaaactattctgtgtctcgatatcagtggactgagggaatgcgatcagccgtcggcacaatcatggcgtcagctggtggtgggacggtgacggtgctgatctcacggtggacaacgaagaaaatccaggtggatatgttgatcgacggaatgctcgcttcactagtatccagtacagctggctgcctgttcttcaccccatggcaggcgacactggttggtgcgattgggtcagctatggcgctgctgatttacccgctgttggagaaggcacagatagatgatccagtgggagttgttcctgttcacgtggttggctcagtctggggtatgatcagtccagctatcttcgtctgtagagattttggcctcgaggaccatcaggtcaccaacgagaacgatctctccggtgtgctctacgggggcggagtgacgctgcttctctaccagcttgctgctctaggagcgatcgcgtttttcagtgggacttgcgccttcgctatcttatttatcctacaacattctccaataggactacgcctgtctcgtctggatgaggagcttggtgctgatctcagagaacatggccttgctggtgtcaacgtcatgacgtacaccatcgaaaagaaactcacagcagaaaacctgagcgccgttctgatggtgatcgttcgatggcgtgctaaggcaaagctcggagcgttgcgacgacgtcggattgccgacatgcatccgacggagacggagctgggcgtcgagatgatgcgcctgcagaaacgacgagccacattgacccgtcttcaacaggctgtcaatcagggccagtga

SEQ ID NO: 249 - DNA, 1506 bp, Ancylostoma ceylanicum
atgacaactaaactgcacaatccagaaatccaagatgacggtgtttggatgactgcttcaagttttactatattcactatgactgcaggctttggattgctcgaatctggacgggtctcatcaaaagacgaggtaaatgtgatggtgaaaaacgttgtcgacgtcatattcggaggtctcgcttactggatgttcgggtatggattcacttttggcgagaagtttattaatcctttcattggaataggcgactattttttcgatcctgaacgagaggacggatccactccagacaaggctggtacatcgtatgcgttgtttctgttccaaatgagtttcgctaccacaacatcgaccatcgtttcagctggcatggcagagcgtattcatctacaatcgcactgcttcgtctcttttttcatcactttggtgcactcagtggctggacactgggtttggcatcgcaccggggtgttcaggaccatgggcgtgatcgattcggctggctgtagtgcggtacatctcgtcgggggcatgtctggtcttgtagcaactctttacctaaaaccgcgacaacaccgtttcaaggacaaaagagctcgacaaatcagcgatcctacaaaggctatattgggattcctcatgatctggtggggttggctggcgttcaacactgcatcaaactattctgtgtctcgatatcagtggactgagggaatgcgatcagccgtcggcacaatcatggcgtcagctggtggtgggacggtgacggtgctgatctcacggtggacaacgaagaaaatccaggtggatatgttgatcgacggaatgctcgcttcactagtatccagtacagctggctgcctgttcttcaccccatggcaggcgacactggttggtgcgattgggtcagctatggcgctgctgatttacccgctgttggagaaggcacagatagatgatccagtgggagttgttcctgttcacgtggttggctcagtctggggtatgatcagtccagctatcttcgtctgtagagattttggcctcgaggaccatcaggtcaccaacgagaacgatctctccggtgtgctctacgggggcggagtgacgctgcttctctaccagcttgctgctctaggagcgatcgcgtttttcagtgggacttgcgccttcgctatcttatttatcctacaacattctccaataggactacgcctgtctcgtctggatgaggagcttggtgctgatctcagagaacatggccttgctggtgtcaacgtcatgacgtacaccatcgaaaagaaactcacagcagaaaacctgagcgccgttctgatggtgatcgttcgatggcgtgctaaggcaaagctcggagcgttgcgacgacgtcggattgccgacatgcatccgacggagacggagctgggcgtcgagatgatgcgcctgcagaaacgacgagccacattgacccgtcttcaacaggctgtcaatcagggccagtga

SEQ ID NO: 250 - DNA, 990 bp, Ancylostoma ceylanicum
  modified_base (979)..(979): a, c, t, g, unknown or other
atggttcgcgaacgtatccctgcccaacaagtcgatgtttcgatccttggcgcaccgttgaaatttcgtaacacccgtaaggcaaaaaatcggttcctcaaggcctccatgactgaaaaactcagcacttgggactcggaagatctatccagaagaggtataccaacacaagatctgatcaacgtgtacgacaagtgggggcacggaggcttcggaatgattctgaccggaaatgtgatggtggatccgcgcaacctggaaagtgctggaaatccaatcatctgcaaagaaaacgattcaccacagctacggaaggcattctcgaaattagccagtatttcaaaagaagacggagcatttgttgtcgctcagatctcgcatgcaggacgacaaacaccactggctgtaaatgagcatccgtactcatgttctgatgtgcaattggtgagcgaagttgtaaaaacagggaagccgatacctctagcactggatcagattaagactgaagtgatcgaccgatttgtatacgcagcaaaagtagcgtacgaaacaggattcgatggagttcaacttcatgcagcacatggttaccttctgtctcagttcctgtcccccactaccaacaaacgtactgatcgttatggaggatcactgcacaaccgaattcgcatcattgtagaaatattcaatgctatcagaaaagagataccagcaacaacagggtttctggtcggaataaagacgaattctgtagagtttcaagcaaatggcttgaccatcgaggatgcgaaagaagcctgctctataatggagatacggccagtgttcagagagactgttgtttacgtcactggtggattccgtacagccatcggaatggttcaggcgatcaagagtggagtcactgacggcattggtttggcaagacccgtcacagcagaaccaggtgctgtgttagcagacagatccaagtacaatncgtacatctga

SEQ ID NO: 251 - DNA, 1020 bp, Ancylostoma ceylanicum
  modified_base (1009)..(1009): a, c, t, g, unknown or other
atggttcgcgaacgtatccctgcccaacaagtcgatgtttcgatccttggcgcaccgttgaaatttcgtaacacccgtaaggcaaaaaatcggttcctcaaggcctccatgactgaaaaactcagcacttgggactcggaagatctatccagaagaggtataccaacacaagatctgatcaacgtgtacgacaagtgggggcacggaggcttcggaatgattctgaccggaaatgtgatggtggatccgcgcaacctggaaagtgctggaaatccaatcatctgcaaagaaaacgattcaccacagctacggaaggcattctcgaaattagccagtatttcaaaagaagacggagcatttgttgtcgctcagatctcgcatgcaggacgacaaacaccactggctgtaaatgagcatccgtactcatgttctgatgtgcaattggtgagcgaagttgtaaaaacagggaagccgatacctctagcactggatcagattaagactgaagtgatcgaccgatttgtatacgcagcaaaagtagcgtacgaaacaggtttgtgctcactcgtgcctctcaacaaaggattcgatggagttcaacttcatgcagcacatggttaccttctgtctcagttcctgtcccccactaccaacaaacgtactgatcgttatggaggatcactgcacaaccgaattcgcatcattgtagaaatattcaatgctatcagaaaagagataccagcaacaacagggtttctggtcggaataaagacgaattctgtagagtttcaagcaaatggcttgaccatcgaggatgcgaaagaagcctgctctataatggagatacggccagtgttcagagagactgttgtttacgtcactggtggattccgtacagccatcggaatggttcaggcgatcaagagtggagtcactgacggcattggtttggcaagacccgtcacagcagaaccaggtgctgtgttagcagacagatccaagtacaatncgtacatctga

SEQ ID NO: 252 - DNA, 1353 bp, Ancylostoma ceylanicum
atggtctacgagcgtattgcagctaaagttgtggatacctcgatacttgggactaaattggctttccgctgcggccgcacagcaaacaatcgttttctcaaggccgctctatcggaaaaacttagcacatacgatgcaacagacttgtcaaaaagaggcacaccaacacctgagctgatcaatgtgtacgataaatggggccgaggaggatacggcgtcattcttactggaaatgtgatggtggatccgcgcaatctggaaaatgccgggaacccgatcatttgcaaggaaaacgaatcgtctcacctaagaaaagccttttccgaaatggcaagagtctccaaacaggatggagcgctcgtagtagcgcagctttcgcatgcagggagacaaacgccacttgtcgtcaacgaacacccgtactcgtgctctgacgagcagctagagagcgtattcgtgaagagtggaaaaccagttccactacagcttgatcaaatcaagccagaagtcattgatcgattcatttccgctgcaaaatttgcgtatgatacaggattcgatggagttcaactccacgcggctcatggttacctcctatctcagttcatgtctcctacaacgaacaaacgcaatgataggtatggcggctcgttggagaacagatttcgtgtgatcaaagagatcttcgaaggaatcagaaatgaaattcccgcatcaactggattcatcgtaggtatcaagacgaactcggtagaatttcagaaggaaggcttaactactgatgacgcgaagtccgcttgtgccatgatggagcaatgtggatttgacttcgtggaactatctgggggaaatttggcaagaatggcgtgggctcacgaacgcgagtccactagaaagcgtgaagcttacttcatagaactagcagagaagattcgacccgttttcaaagacaccgtcttgtatgtaacaggaggattccgcacggcgcccgcaatggtggatgcaatcaaaggaaatgcgactgatggaattggcttggggagaccgataaccgcagagccagatttgcccttgaaaatccttgcgcagaagtgtatggcagctcctgacacgaagcttgaccaagatgactttatcataacgtatttgttgtgcatcgtacaaatgggacaaatggctaaaaaacctgcatcggctttgaagagcgtttgtgacggtattgccgatttgagtcgagtggaggaggcggaaaacttcatcaagtatgcagcaggcctacaaaaggaggtcgagaaacttactgtggagcgcaagccattctatggaatagttccttatactaacttattctga

SEQ ID NO: 253 - DNA, 393 bp, Ancylostoma ceylanicum
  modified_base (297)..(297): a, c, t, g, unknown or other
atggcaagagtctccaaacaggatggagcgctcgtagtagcgcagctttcgcatgcaggaagacaaacgccgcttgccgttaacgaacatccgtactcgtgctcgaacgtgcagctagagagcaaactctctaagagtggaaaaccaattccgttacaacttgatcagatcaagccagaagtcattgatcgattcgtttatgctgccaaagttgcgtacgatacaggatacgatggagttcaactccatgcagctcatggctaccttctatctcagttcatgtctccttcaacgaangaaggtgtaatatcggatgagacaatggtcatctatcagatcaagatgttttcacttctgtaccttccttcccatttctgtagtcaaatgttctga

SEQ ID NO: 254 - DNA, 810 bp, Ancylostoma ceylanicum
atgtttgaaggatacgatggagttcaactccatgcagctcatggctaccttctatctcagttcatgtctccttcaacgaataaacgcactgatagatatggcggctcgatggagaacagatttcgtgtaatcaaagagatctttgaagggatcagaaaggaaattccagcatcgaccggatttatcgtaggtatcaagacgaactcggtagaatttcagaaagatggtctaactactgaagacgcaaagaccgcttgtgccatgatggagcaatgtggatttgacttcgttgaactatctggaggaaattttacaagattggcgtgggctcacgaacgcgagtctactagaaggcgtgaagcttactttatagaactagcagagaagattcgacccgtcttcaaggacaccgttttgtatgtaacaggaggatttcgcaccgcgcccgcaatggtaaatgcaatcaaagcaaatgcgactgatggaattggcttgggaagaccgacaagcgcagagccagatttgccgttgaaaatcctcacgcagaattgcatggcagctcctgacacaaaacttgaccaagatgacttcatcataacgtgctttttgtgtatggtgcaaatgggacaaatggctaaacagcctgcatcggctttgaagagcgtttgtgacggtattgccgatttgagtcgagtggaggaggcggaaaacttcatcaagcatgcagcagtcttacaaaaggaggtcgcgaaacttagtgaggagcgcaagccattctatggaatagttccttatactaatttattttga

SEQ ID NO: 255 - DNA, 1101 bp, Ancylostoma ceylanicum
  modified_base (297)..(297): a, c, t, g, unknown or other
atggcaagagtctccaaacaggatggagcgctcgtagtagcgcagctttcgcatgcaggaagacaaacgccgcttgccgttaacgaacatccgtactcgtgctcgaacgtgcagctagagagcaaactctctaagagtggaaaaccaattccgttacaacttgatcagatcaagccagaagtcattgatcgattcgtttatgctgccaaagttgcgtacgatacaggatacgatggagttcaactccatgcagctcatggctaccttctatctcagttcatgtctccttcaacgaangaaggatacgatggagttcaactccatgcagctcatggctaccttctatctcagttcatgtctccttcaacgaataaacgcactgatagatatggcggctcgatggagaacagatttcgtgtaatcaaagagatctttgaagggatcagaaaggaaattccagcatcgaccggatttatcgtaggtatcaagacgaactcggtagaatttcagaaagatggtctaactactgaagacgcaaagaccgcttgtgccatgatggagcaatgtggatttgacttcgttgaactatctggaggaaattttacaagattggcgtgggctcacgaacgcgagtctactagaaggcgtgaagcttactttatagaactagcagagaagattcgacccgtcttcaaggacaccgttttgtatgtaacaggaggatttcgcaccgcgcccgcaatggtaaatgcaatcaaagcaaatgcgactgatggaattggcttgggaagaccgacaagcgcagagccagatttgccgttgaaaatcctcacgcagaattgcatggcagctcctgacacaaaacttgaccaagatgacttcatcataacgtgctttttgtgtatggtgcaaatgggacaaatggctaaacagcctgcatcggctttgaagagcgtttgtgacggtattgccgatttgagtcgagtggaggaggcggaaaacttcatcaagcatgcagcagtcttacaaaaggaggtcgcgaaacttagtgaggagcgcaagccattctatggaatagttccttatactaatttattttga

SEQ ID NO: 256 - DNA, 1593 bp, Ancylostoma ceylanicum
  modified_base (789)..(789): a, c, t, g, unknown or other
atgattgaggaacaagctcatctattctgctgctgtcgggacggggccatcgaccctgctgcagcctgggaggtgcatatctgtcctgctagtgtcggagcggtactgggtcattctgcaacgcaaagagcagtgaattctacaactttctgtcagtggcttcaaatggtctacgagcgcattgcagctgatgttgttgacgtctcgattctcgggactaaattagcgttccgctgcggccgcacagccaacaatcgttttctcaaggccgctctgtcggaaaaactaagcacatacgatgaaacagacttatcaaaaagaggcatgccaacacctgagctcatcaatatgtacgataaatggggtcgaggaggatacggcgtcattctcactggaaacgtgatggtggatccgtgcaacctggaaagtgccggaaatccgatcatttgcaaggaaaacgaatcgccccatctaagaaaagctttttccgaaatggcaagagtctccaaacaggatggagcgctcgtagtagcgcagctttcgcatgcaggaagacaaacgccgcttgccgttaacgaacatccgtactcgtgctcgaacgtgcagctagagagcaaactctctaagagtggaaaaccaattccgttacaacttgatcagatcaagccagaagtcattgatcgattcgtttatgctgccaaagttgcgtacgatacaggatacgatggagttcaactccatgcagctcatggctaccttctatctcagttcatgtctccttcaacgaangaaggatacgatggagttcaactccatgcagctcatggctaccttctatctcagttcatgtctccttcaacgaataaacgcactgatagatatggcggctcgatggagaacagatttcgtgtaatcaaagagatctttgaagggatcagaaaggaaattccagcatcgaccggatttatcgtaggtatcaagacgaactcggtagaatttcagaaagatggtctaactactgaagacgcaaagaccgcttgtgccatgatggagcaatgtggatttgacttcgttgaactatctggaggaaattttacaagattggcgtgggctcacgaacgcgagtctactagaaggcgtgaagcttactttatagaactagcagagaagattcgacccgtcttcaaggacaccgttttgtatgtaacaggaggatttcgcaccgcgcccgcaatggtaaatgcaatcaaagcaaatgcgactgatggaattggcttgggaagaccgacaagcgcagagccagatttgccgttgaaaatcctcacgcagaattgcatggcagctcctgacacaaaacttgaccaagatgacttcatcataacgtgctttttgtgtatggtgcaaatgggacaaatggctaaacagcctgcatcggctttgaagagcgtttgtgacggtattgccgatttgagtcgagtggaggaggcggaaaacttcatcaagcatgcagcagtcttacaaaaggaggtcgcgaaacttagtgaggagcgcaagccattctatggaatagttccttatactaatttattttga

SEQ ID NO: 257 - DNA, 1530 bp, Ancylostoma ceylanicum
  modified_base (726)..(726): a, c, t, g, unknown or other
atgattgaggaacaagctcatctattctgctgctgtcgggacggggccatcgaccctgctgcagcctgggagaattctacaactttctgtcagtggcttcaaatggtctacgagcgcattgcagctgatgttgttgacgtctcgattctcgggactaaattagcgttccgctgcggccgcacagccaacaatcgttttctcaaggccgctctgtcggaaaaactaagcacatacgatgaaacagacttatcaaaaagaggcatgccaacacctgagctcatcaatatgtacgataaatggggtcgaggaggatacggcgtcattctcactggaaacgtgatggtggatccgtgcaacctggaaagtgccggaaatccgatcatttgcaaggaaaacgaatcgccccatctaagaaaagctttttccgaaatggcaagagtctccaaacaggatggagcgctcgtagtagcgcagctttcgcatgcaggaagacaaacgccgcttgccgttaacgaacatccgtactcgtgctcgaacgtgcagctagagagcaaactctctaagagtggaaaaccaattccgttacaacttgatcagatcaagccagaagtcattgatcgattcgtttatgctgccaaagttgcgtacgatacaggatacgatggagttcaactccatgcagctcatggctaccttctatctcagttcatgtctccttcaacgaangaaggatacgatggagttcaactccatgcagctcatggctaccttctatctcagttcatgtctccttcaacgaataaacgcactgatagatatggcggctcgatggagaacagatttcgtgtaatcaaagagatctttgaagggatcagaaaggaaattccagcatcgaccggatttatcgtaggtatcaagacgaactcggtagaatttcagaaagatggtctaactactgaagacgcaaagaccgcttgtgccatgatggagcaatgtggatttgacttcgttgaactatctggaggaaattttacaagattggcgtgggctcacgaacgcgagtctactagaaggcgtgaagcttactttatagaactagcagagaagattcgacccgtcttcaaggacaccgttttgtatgtaacaggaggatttcgcaccgcgcccgcaatggtaaatgcaatcaaagcaaatgcgactgatggaattggcttgggaagaccgacaagcgcagagccagatttgccgttgaaaatcctcacgcagaattgcatggcagctcctgacacaaaacttgaccaagatgacttcatcataacgtgctttttgtgtatggtgcaaatgggacaaatggctaaacagcctgcatcggctttgaagagcgtttgtgacggtattgccgatttgagtcgagtggaggaggcggaaaacttcatcaagcatgcagcagtcttacaaaaggaggtcgcgaaacttagtgaggagcgcaagccattctatggaatagttccttatactaatttattttga

SEQ ID NO: 258 - DNA, 1560 bp, Ancylostoma ceylanicum
  modified_base (756)..(756): a, c, t, g, unknown or other
atgattgaggaacaagctcatctattctgctgctgtcgggacggggccatcgaccctgctgcagcctgggaggtgcatatctgtcctgctagtgtcggagcgaattctacaactttctgtcagtggcttcaaatggtctacgagcgcattgcagctgatgttgttgacgtctcgattctcgggactaaattagcgttccgctgcggccgcacagccaacaatcgttttctcaaggccgctctgtcggaaaaactaagcacatacgatgaaacagacttatcaaaaagaggcatgccaacacctgagctcatcaatatgtacgataaatggggtcgaggaggatacggcgtcattctcactggaaacgtgatggtggatccgtgcaacctggaaagtgccggaaatccgatcatttgcaaggaaaacgaatcgccccatctaagaaaagctttttccgaaatggcaagagtctccaaacaggatggagcgctcgtagtagcgcagctttcgcatgcaggaagacaaacgccgcttgccgttaacgaacatccgtactcgtgctcgaacgtgcagctagagagcaaactctctaagagtggaaaaccaattccgttacaacttgatcagatcaagccagaagtcattgatcgattcgtttatgctgccaaagttgcgtacgatacaggatacgatggagttcaactccatgcagctcatggctaccttctatctcagttcatgtctccttcaacgaangaaggatacgatggagttcaactccatgcagctcatggctaccttctatctcagttcatgtctccttcaacgaataaacgcactgatagatatggcggctcgatggagaacagatttcgtgtaatcaaagagatctttgaagggatcagaaaggaaattccagcatcgaccggatttatcgtaggtatcaagacgaactcggtagaatttcagaaagatggtctaactactgaagacgcaaagaccgcttgtgccatgatggagcaatgtggatttgacttcgttgaactatctggaggaaattttacaagattggcgtgggctcacgaacgcgagtctactagaaggcgtgaagcttactttatagaactagcagagaagattcgacccgtcttcaaggacaccgttttgtatgtaacaggaggatttcgcaccgcgcccgcaatggtaaatgcaatcaaagcaaatgcgactgatggaattggcttgggaagaccgacaagcgcagagccagatttgccgttgaaaatcctcacgcagaattgcatggcagctcctgacacaaaacttgaccaagatgacttcatcataacgtgctttttgtgtatggtgcaaatgggacaaatggctaaacagcctgcatcggctttgaagagcgtttgtgacggtattgccgatttgagtcgagtggaggaggcggaaaacttcatcaagcatgcagcagtcttacaaaaggaggtcgcgaaacttagtgaggagcgcaagccattctatggaatagttccttatactaatttattttga

SEQ ID NO: 259 - DNA, 1749 bp, Ancylostoma ceylanicum
atgacaacatttccactgattcgatatagtccgaaaccagttacgctgagccctcacgtgctcacaacaggaccgcacgtgcttattaaatactgtggtgataaagacactagcaatctcaaggtggacgaggataacaggacggatagccgagtggataaagcagcggactctcaaccaatgatgaacaatggaaaggcaagtttgaatccttcggggagcataagaccattcccaacaatcccactttgccagttggtcactgtttcgttattattctaaatggttcatgaaagggttcaagccgagaacgtcgacgttactatacttggtacagagctgacattccgcaatggcagaaaagcaaaaaaccgtttccttaaggcggcattgtcagaaaagctcagcacatgggatgatcaagacccttctaagagaggaatacctacacaggagttgatcaacatatatgacaagtggggtaacggaggatacggtgtcatccttactggtaacatcgcagtagatccgtgcaatcttgaaagtgcaggaaatgctatcatctgcaaagaaaatgtttctccacaatcgaaggaaaggttttacaagatggcgaaagtttcaaaaaacgatggagcactcatcattgcacagctttcacatgcaggtcgacaaactccattagctgtcaacgagcacccgtactcttgttcggatatacagttagtaagcaaagttgtgactagtggaaaaccagtaccacttgaactcgatcaaatcaaaacggaagtgattgacagatttgtttttgccgcgaagttcgctttcgatgcaggctttgatggagtagagattcatgcagctcatggtttcctattgtcgcagtttttgtctccttccactaacaaacgaaacgataaatatggcggttcgttggagaacagagctcgcattattgtagaaatttacgaggcaatcagaaacttctccccagttgcactatctgcttttccatgcaaccaatcaatcgacaggcagaaatcgcccgatgaagttgttttatggtggaaggatgaagccttagattttaagataaaagaaataccagcaacaaaaggatttgtcattggggtaaagattaattccgtggagttgcagaaagatggactaacagtcgaggagtctgcagttgtttgttcaatgatggaaaaaaacggttttgatttcgtagagctatccggtggaacattttctagacctgccttataccatgagcgtgagactacaagaaaacgcgaagcgtatttcattgaatttgcagagaagattcgccctgtgttcaaaaacaccgtcttatacttaacgggaggattccgcacggcagccgcaatggtggacgctatcaagtgtggtgcgactaatggcataggattaggaagaccaacaaccgcggaaccggatctcccactgaagatattgaaacagaactgtatgtctgtcgctaacacaaaggtcaaccaagatgactttttcatgacgctactggtgtgcactgcacaaatgggtcaaatggcaaagcgccccacatcagaactgaggaatgtatgcgacggcattgctgatctcagcagagtagaggaagcagaaaatttcaaaaagcttgtagctgactatgttcgtgagataggaaaactgaatgagcaacgaaagccagtgtatggagtcttccgatataccaatttattttaa

SEQ ID NO: 260 - DNA, 1617 bp, Ancylostoma ceylanicum
atgacaacatttccactgattcgatatagtccgaaaccagttacgctgagccctcacgtgctcacaacaggaccgcacgtgcttattaaatactgtggtgataaagacactagcaatctcaagttggtcactgtttcgttattattctaaatggttcatgaaagggttcaagccgagaacgtcgacgttactatacttggtacagagctgacattccgcaatggcagaaaagcaaaaaaccgtttccttaaggcggcattgtcagaaaagctcagcacatgggatgatcaagacccttctaagagaggaatacctacacaggagttgatcaacatatatgacaagtggggtaacggaggatacggtgtcatccttactggtaacatcgcagtagatccgtgcaatcttgaaagtgcaggaaatgctatcatctgcaaagaaaatgtttctccacaatcgaaggaaaggttttacaagatggcgaaagtttcaaaaaacgatggagcactcatcattgcacagctttcacatgcaggtcgacaaactccattagctgtcaacgagcacccgtactcttgttcggatatacagttagtaagcaaagttgtgactagtggaaaaccagtaccacttgaactcgatcaaatcaaaacggaagtgattgacagatttgtttttgccgcgaagttcgctttcgatgcaggctttgatggagtagagattcatgcagctcatggtttcctattgtcgcagtttttgtctccttccactaacaaacgaaacgataaatatggcggttcgttggagaacagagctcgcattattgtagaaatttacgaggcaatcagaaacttctccccagttgcactatctgcttttccatgcaaccaatcaatcgacaggcagaaatcgcccgatgaagttgttttatggtggaaggatgaagccttagattttaagataaaagaaataccagcaacaaaaggatttgtcattggggtaaagattaattccgtggagttgcagaaagatggactaacagtcgaggagtctgcagttgtttgttcaatgatggaaaaaaacggttttgatttcgtagagctatccggtggaacattttctagacctgccttataccatgagcgtgagactacaagaaaacgcgaagcgtatttcattgaatttgcagagaagattcgccctgtgttcaaaaacaccgtcttatacttaacgggaggattccgcacggcagccgcaatggtggacgctatcaagtgtggtgcgactaatggcataggattaggaagaccaacaaccgcggaaccggatctcccactgaagatattgaaacagaactgtatgtctgtcgctaacacaaaggtcaaccaagatgactttttcatgacgctactggtgtgcactgcacaaatgggtcaaatggcaaagcgccccacatcagaactgaggaatgtatgcgacggcattgctgatctcagcagagtagaggaagcagaaaatttcaaaaagcttgtagctgactatgttcgtgagataggaaaactgaatgagcaacgaaagccagtgtatggagtcttccgatataccaatttattttaa

SEQ ID NO: 261 - DNA, 1575 bp, Ancylostoma ceylanicum
atggggaggtttaactgtatgaactaccaaggaattgcatggctatgcagaagaccattcccaacaatcccactttgccagttggtcactgtttcgttattattctaaatggttcatgaaagggttcaagccgagaacgtcgacgttactatacttggtacagagctgacattccgcaatggcagaaaagcaaaaaaccgtttccttaaggcggcattgtcagaaaagctcagcacatgggatgatcaagacccttctaagagaggaatacctacacaggagttgatcaacatatatgacaagtggggtaacggaggatacggtgtcatccttactggtaacatcgcagtagatccgtgcaatcttgaaagtgcaggaaatgctatcatctgcaaagaaaatgtttctccacaatcgaaggaaaggttttacaagatggcgaaagtttcaaaaaacgatggagcactcatcattgcacagctttcacatgcaggtcgacaaactccattagctgtcaacgagcacccgtactcttgttcggatatacagttagtaagcaaagttgtgactagtggaaaaccagtaccacttgaactcgatcaaatcaaaacggaagtgattgacagatttgtttttgccgcgaagttcgctttcgatgcaggctttgatggagtagagattcatgcagctcatggtttcctattgtcgcagtttttgtctccttccactaacaaacgaaacgataaatatggcggttcgttggagaacagagctcgcattattgtagaaatttacgaggcaatcagaaacttctccccagttgcactatctgcttttccatgcaaccaatcaatcgacaggcagaaatcgcccgatgaagttgttttatggtggaaggatgaagccttagattttaagataaaagaaataccagcaacaaaaggatttgtcattggggtaaagattaattccgtggagttgcagaaagatggactaacagtcgaggagtctgcagttgtttgttcaatgatggaaaaaaacggttttgatttcgtagagctatccggtggaacattttctagacctgccttataccatgagcgtgagactacaagaaaacgcgaagcgtatttcattgaatttgcagagaagattcgccctgtgttcaaaaacaccgtcttatacttaacgggaggattccgcacggcagccgcaatggtggacgctatcaagtgtggtgcgactaatggcataggattaggaagaccaacaaccgcggaaccggatctcccactgaagatattgaaacagaactgtatgtctgtcgctaacacaaaggtcaaccaagatgactttttcatgacgctactggtgtgcactgcacaaatgggtcaaatggcaaagcgccccacatcagaactgaggaatgtatgcgacggcattgctgatctcagcagagtagaggaagcagaaaatttcaaaaagcttgtagctgactatgttcgtgagataggaaaactgaatgagcaacgaaagccagtgtatggagtcttccgatataccaatttattttaa

SEQ ID NO: 262 - DNA, 1671 bp, Ancylostoma ceylanicum
atgacaacatttccactgattcgatatagtccgaaaccagttacgctgagccctcacgtgctcacaacaggaccgcacgtgcttattaaatactgtggtgataaagacactagcaatctcaaggtggacgaggataacaggacggatagccgagtggataaagcagcggactctcaaccaatgatgaacaatggaaaggcaaaaatggttcatgaaagggttcaagccgagaacgtcgacgttactatacttggtacagagctgacattccgcaatggcagaaaagcaaaaaaccgtttccttaaggcggcattgtcagaaaagctcagcacatgggatgatcaagacccttctaagagaggaatacctacacaggagttgatcaacatatatgacaagtggggtaacggaggatacggtgtcatccttactggtaacatcgcagtagatccgtgcaatcttgaaagtgcaggaaatgctatcatctgcaaagaaaatgtttctccacaatcgaaggaaaggttttacaagatggcgaaagtttcaaaaaacgatggagcactcatcattgcacagctttcacatgcaggtcgacaaactccattagctgtcaacgagcacccgtactcttgttcggatatacagttagtaagcaaagttgtgactagtggaaaaccagtaccacttgaactcgatcaaatcaaaacggaagtgattgacagatttgtttttgccgcgaagttcgctttcgatgcaggctttgatggagtagagattcatgcagctcatggtttcctattgtcgcagtttttgtctccttccactaacaaacgaaacgataaatatggcggttcgttggagaacagagctcgcattattgtagaaatttacgaggcaatcagaaacttctccccagttgcactatctgcttttccatgcaaccaatcaatcgacaggcagaaatcgcccgatgaagttgttttatggtggaaggatgaagccttagattttaagataaaagaaataccagcaacaaaaggatttgtcattggggtaaagattaattccgtggagttgcagaaagatggactaacagtcgaggagtctgcagttgtttgttcaatgatggaaaaaaacggttttgatttcgtagagctatccggtggaacattttctagacctgccttataccatgagcgtgagactacaagaaaacgcgaagcgtatttcattgaatttgcagagaagattcgccctgtgttcaaaaacaccgtcttatacttaacgggaggattccgcacggcagccgcaatggtggacgctatcaagtgtggtgcgactaatggcataggattaggaagaccaacaaccgcggaaccggatctcccactgaagatattgaaacagaactgtatgtctgtcgctaacacaaaggtcaaccaagatgactttttcatgacgctactggtgtgcactgcacaaatgggtcaaatggcaaagcgccccacatcagaactgaggaatgtatgcgacggcattgctgatctcagcagagtagaggaagcagaaaatttcaaaaagcttgtagctgactatgttcgtgagataggaaaactgaatgagcaacgaaagccagtgtatggagtcttccgatataccaatttattttaa

SEQ ID NO: 263 - DNA, 1365 bp, Ancylostoma ceylanicum
atgaacattcatgttattctcacagtcatactcgtctggctaccatattcgagctcgcgtagagcgcggaagaaagcatgtaagcggaccactttcgaccggcatacgaccaactatcaggcgtggcgcgagcagatgacagtgtgtgacctgctcaacgagtacgacgctgccgtacggccgagcggacgaacgccgtacaacaataccaaaggccctgtgatagtaactacaagcctgaacattcgatccatatcggccgtatccgagaagaatatggagttcgtggcgcagtttcgatttcgccaggaatggttcgacgaccgattacgctttatggatcatcagggaccgctttcgccagagtatcgtaacttcgaatttatccatgtagccagagatcaacgcttatggatccctgacacatttttccaaaacgaaagaaacgggtggtaccacatgttggaccaggagaatcgcttcttgaagattcgctcagacgggaaactcatttatgatagaagattaacacttcacttatcgtgttccatgcatttatcgcgttatccaatggactcgcagaactgcgagatcgcttttgcatcatatgcctataccaccgacgacatcaagtacgagtgggacgtcgaggcgatccggatccacgacggcgccaacggtgctctgcccaactttgacatcgcgaaattcacaaacgggacgtgtcactcgaagacgaacacgggtgagtactcctgcctgcgagtagaactcaagctgaaccgtgtgttctcgttcttcctcctgcaactgtacatcccgtcgtccatgctggtcggtgtcgcctgggtgtcctactggatcgactggaaaagtacggcagctcgcgtacctctggctatcgtgacactgctcacgatgatcacgacttcacacgccattaactcaaatctgccacctgtttcctacgcgaagtcgatcgacatctgggtcggtgcctgtgtggtgttcatcttcttctcgctgatagagtacgctgttgtcaactacatgggtatcatggatgagcacagacaaatgcgaaaggcagcatgcaatcgtagtcgtctttcgaacgtgatcgacaaccagttctacatgcaatgcgtcgagcagatgacatcacctacctctttggtcgggtttagtccacaagagaagaagcgccttcttcgacgaaaacgcaacaagtctctggagttacgagaggaggaagttggtatggaatatgacggtatagagctaggagacatagcacaaccaccaagaacagctggacacattgagcagggatggacattccaggtaattcatgaaatgtgctaa

SEQ ID NO: 264 - DNA, 870 bp, Ancylostoma ceylanicum
atggatgtccagacatgtctgatcgatttggcttcctatgcctatacggacaacgatattgagtatcgctggaaagaaaccgatccagtccagctcaaagatggtctcaactcctcattaccgagctttcaacttaacaaggtgtctaccacatactgcactagtaaaacaaatacgggtacatattcatgcctacgaacagttttagaacttaggagacaattcagttactacctactacaactctatatcccatcgtctatgctggtgatagtgtcatgggtgtcattttggctcgatcgatccgccgtaccagctagggttaccctaggggtcacgacgctgcttacaatgactactcaggcatccggtataaacgccaaattaccgcccgtgtcctacacgaaagccatcgacgtatggatcggtgcgtgtttgacgttcatttttggcgcgttactggaatttgcctgggttacgtacatttctacccggaccaccaataaagcgagtcggtccgaaccacggacgggttcactgatcttgtcaaatcaacacgtcgttctacctcatacaactttagacttgcggacacgttcagacggtgaagtttgggtgaaacaaagtcgtttcgatgatgcggcagagttattggttcttggaccgcggacaactagtcgggtcagccggctacaacgaatgttgcggaaatcgtgcgttgtcgcatgggtacgacaacggttagaacctgccgatagcgcgaagaaagcagatctcgtatcaagagctctgttcccgctgtgcttcatcggatttaacattctgtactggaccaactactcgcagtaccacgtgaccggcccgcggtag

SEQ ID NO: 265 - DNA, 1410 bp, Ancylostoma ceylanicum
atgcacctgctgggatctgggcatctaagcactttgctcaattcggtcgcattcatttgggtattcctgaggatgcagctgattccacaatgtgaagccgacgctacctcagacacagagatcatcaaaaaattgctgaacaaaggctatgactggagagtccgaccacctgggattaatttaaccgcgaaaggaagccatggaccagtcgtcgttagcgtcaatatgctcatacggagtatttccaaaatcgacgacgtgaacatggagtacagcgtgcagctgacgtttcgtgaatcgtgggtggatggccggttagcttatggattgccaggcgacaataagccggattttttgatcctgacagccggtcagcagatctggatgccggatagttttttccagaacgagaaacaggcccagaagcacatgatcgacaagccgaatgtgctaataagggttcataaggatggccaaatcctctattcagtcaggatatcgctggtgctctcgtgtccgatgcatttacagtattatccaatggatgtccagacatgtctgatcgatttggcttcctatgcctatacggacaacgatattgagtatcgctggaaagaaaccgatccagtccagctcaaagatggtctcaactcctcattaccgagctttcaacttaacaaggtgtctaccacatactgcactagtaaaacaaatacgggtacatattcatgcctacgaacagttttagaacttaggagacaattcagttactacctactacaactctatatcccatcgtctatgctggtgatagtgtcatgggtgtcattttggctcgatcgatccgccgtaccagctagggttaccctaggggtcacgacgctgcttacaatgactactcaggcatccggtataaacgccaaattaccgcccgtgtcctacacgaaagccatcgacgtatggatcggtgcgtgtttgacgttcatttttggcgcgttactggaatttgcctgggttacgtacatttctacccggaccaccaataaagcgagtcggtccgaaccacggacgggttcactgatcttgtcaaatcaacacgtcgttctacctcatacaactttagacttgcggacacgttcagacggtgaagtttgggtgaaacaaagtcgtttcgatgatgcggcagagttattggttcttggaccgcggacaactagtcgggtcagccggctacaacgaatgttgcggaaatcgtgcgttgtcgcatgggtacgacaacggttagaacctgccgatagcgcgaagaaagcagatctcgtatcaagagctctgttcccgctgtgcttcatcggatttaacattctgtactggaccaactactcgcagtaccacgtgaccggcccgcggtag

SEQ ID NO: 266 - DNA, 1338 bp, Ancylostoma ceylanicum
atgcagctgattccacaatgtgaagccgacgctacctcagacacagagatcatcaaaaaattgctgaacaaaggctatgactggagagtccgaccacctgggattaatttaaccgcgaaaggaagccatggaccagtcgtcgttagcgtcaatatgctcatacggagtatttccaaaatcgacgacgtgaacatggagtacagcgtgcagctgacgtttcgtgaatcgtgggtggatggccggttagcttatggattgccaggcgacaataagccggattttttgatcctgacagccggtcagcagatctggatgccggatagttttttccagaacgagaaacaggcccagaagcacatgatcgacaagccgaatgtgctaataagggttcataaggatggccaaatcctctattcagtcaggatatcgctggtgctctcgtgtccgatgcatttacagtattatccaatggatgtccagacatgtctgatcgatttggcttcctatgcctatacggacaacgatattgagtatcgctggaaagaaaccgatccagtccagctcaaagatggtctcaactcctcattaccgagctttcaacttaacaaggtgtctaccacatactgcactagtaaaacaaatacgggtacatattcatgcctacgaacagttttagaacttaggagacaattcagttactacctactacaactctatatcccatcgtctatgctggtgatagtgtcatgggtgtcattttggctcgatcgatccgccgtaccagctagggttaccctaggggtcacgacgctgcttacaatgactactcaggcatccggtataaacgccaaattaccgcccgtgtcctacacgaaagccatcgacgtatggatcggtgcgtgtttgacgttcatttttggcgcgttactggaatttgcctgggttacgtacatttctacccggaccaccaataaagcgagtcggtccgaaccacggacgggttcactgatcttgtcaaatcaacacgtcgttctacctcatacaactttagacttgcggacacgttcagacggtgaagtttgggtgaaacaaagtcgtttcgatgatgcggcagagttattggttcttggaccgcggacaactagtcgggtcagccggctacaacgaatgttgcggaaatcgtgcgttgtcgcatgggtacgacaacggttagaacctgccgatagcgcgaagaaagcagatctcgtatcaagagctctgttcccgctgtgcttcatcggatttaacattctgtactggaccaactactcgcagtaccacgtgaccggcccgcggtag

SEQ ID NO: 267 - DNA, 1380 bp, Ancylostoma ceylanicum
atgaacggtaaactcagtcggagtcttgccgcagcgcagacgcacgcgttcgaggcctcatgtgaagccgacgctacctcagacacagagatcatcaaaaaattgctgaacaaaggctatgactggagagtccgaccacctgggattaatttaaccgcgaaaggaagccatggaccagtcgtcgttagcgtcaatatgctcatacggagtatttccaaaatcgacgacgtgaacatggagtacagcgtgcagctgacgtttcgtgaatcgtgggtggatggccggttagcttatggattgccaggcgacaataagccggattttttgatcctgacagccggtcagcagatctggatgccggatagttttttccagaacgagaaacaggcccagaagcacatgatcgacaagccgaatgtgctaataagggttcataaggatggccaaatcctctattcagtcaggatatcgctggtgctctcgtgtccgatgcatttacagtattatccaatggatgtccagacatgtctgatcgatttggcttcctatgcctatacggacaacgatattgagtatcgctggaaagaaaccgatccagtccagctcaaagatggtctcaactcctcattaccgagctttcaacttaacaaggtgtctaccacatactgcactagtaaaacaaatacgggtacatattcatgcctacgaacagttttagaacttaggagacaattcagttactacctactacaactctatatcccatcgtctatgctggtgatagtgtcatgggtgtcattttggctcgatcgatccgccgtaccagctagggttaccctaggggtcacgacgctgcttacaatgactactcaggcatccggtataaacgccaaattaccgcccgtgtcctacacgaaagccatcgacgtatggatcggtgcgtgtttgacgttcatttttggcgcgttactggaatttgcctgggttacgtacatttctacccggaccaccaataaagcgagtcggtccgaaccacggacgggttcactgatcttgtcaaatcaacacgtcgttctacctcatacaactttagacttgcggacacgttcagacggtgaagtttgggtgaaacaaagtcgtttcgatgatgcggcagagttattggttcttggaccgcggacaactagtcgggtcagccggctacaacgaatgttgcggaaatcgtgcgttgtcgcatgggtacgacaacggttagaacctgccgatagcgcgaagaaagcagatctcgtatcaagagctctgttcccgctgtgcttcatcggatttaacattctgtactggaccaactactcgcagtaccacgtgaccggcccgcggtag

SEQ ID NO: 268 - DNA, 561 bp, Ancylostoma ceylanicum
atgcagctgattccacaatgtgaagccgacgctacctcagacacagagatcatcaaaaaattgctgaacaaaggctatgactggagagtccgaccacctgggattaatttaaccgcgaaaggaagccatggaccagtcgtcgttagcgtcaatatgctcatacggagtatttccaaaatcgacgacgtgaacatggagtacagcgtgcagctgacgtttcgtgaatcgtgggtggatggccggttagcttatggattgccaggcgacaataagccggattttttgatcctgacagccggtcagcagatctggatgccggatagttttttccagaacgagaaacaggcccagaagcacatgatcgacaagccgaatgtgctaataagggttcataaggatggccaaatcctctattcagtcaggatatcgctggtgctctcgtgtccgatgcatttacaggggccttgtacagtcgcagccgtagaatctgaaatttgtgctggttggtctgtgagtgaatcgcgggaatacgaagatgtgtactcgtggcctagtggatag

SEQ ID NO: 269 - DNA, 639 bp, Ancylostoma ceylanicum
atggacccaacacaagccttcgactttatcccggcaaaaatgtgtgatcttccggagttggtcgatatgtgcactacaagttttattcatgccgagcctcattcgaaggctctgaatatcacagcggaaggtaccagaggagtgttcgagtatatcgtagccaaggctttacattacccttactcctatcggatacacgagaagggcacgaataaaatcatcggctttcgcctgttatccgtgggacacagggaccacaccttggacatcgaacccataccactggttgaacctactgagccaggaacgttgcgattcgcgcggatactggacgaatcgaaggaaaatttctggagagtggtggatccctccgtggcggaagtgattcgacgggaaatcacatacgtcattccacagcatcaacgaaaaggcatcgctaaccacctcattcacctcggattagactttcaggagttgaagaagcaaggcttccacggcataacatccgaggcgacatcactagccaatcaaaggctactgacaaagcatggctacacctgcgtcagtcggccgaactataaactcgacatgttcgacggcaatgagggcgtgatggtgtttttcaaggatcttcggtag

SEQ ID NO: 270 - DNA, 471 bp, Ancylostoma ceylanicum
atgggctgtttacacatgattcaccaatttcagggcacggataaaatcataggttttcgtctcctatctattggacacagagatcacaccctagacatagaacccgtcccattcgtcgaacccactgaaccaggagcagtgcgactgtgtgcgatactggacgaatcgaagggaaagttctggaaactcgtggatcccaccgtggatactgtgattcgacgtgaaatcacgtatgtgatcccacagcatcaacgaaagggcatagcgaactatctagttcatcttggactcaattttgagggattgaaaaaacaaggtatccatggcataacttctgaggcgtcatcactagccaatcagcgactactgacaaagcacggctatacctgcctcagtagaccgaactataaactcgacatgtttgacggcaacgagggtgtgatggtgtttttcaaggatcttcggaagtga

SEQ ID NO: 271 - DNA, 456 bp, Ancylostoma ceylanicum
atgattcaccaatttcagggcacggataaaatcataggttttcgtctcctatctattggacacagagatcacaccctagacatagaacccgtcccattcgtcgaacccactgaaccaggagcagtgcgactgtgtgcgatactggacgaatcgaagggaaagttctggaaactcgtggatcccaccgtggatactgtgattcgacgtgaaatcacgtatgtgatcccacagcatcaacgaaagggcatagcgaactatctagttcatcttggactcaattttgagggattgaaaaaacaaggtatccatggcataacttctgaggcgtcatcactagccaatcagcgactactgacaaagcacggctatacctgcctcagtagaccgaactataaactcgacatgtttgacggcaacgagggtgtgatggtgtttttcaaggatcttcggaagtga

SEQ ID NO: 272 - DNA, 669 bp, Ancylostoma ceylanicum
atgctggtgtgcaatccccgagcaggtcttattctctccactggtgctggctcggagattcagttctcgacgtccgggttgtataaagaagacggagaaaagaactaccatcgagttgttgacctgtttgatgccgaggcatatgctgacgcattctacgcggctgctacggagtcggatgagtccaggaaagctcatggcaagagattgagtgaattcatactatctaacgatattgaacgatggagtgctgcgttcctggatccaagctggacgcatctggttattcgcccaatgcaggtcaacactttggatgatttcttctcactaatgatgcgaacaaggaatgtacggagacaaattgttgatcgagtactgaaaggaatccctataaggcctcatttcgccattagtattcgcaatgcaaaggagtctcttgagaacagctgcgaatcagattcacatacacttgtcctccgggcatcacaagattctcctgataaggccaaattcgacatcaaaaatgaactacaagagtttgagaaggacctctccttcatggactacgcccaaagtgaagatgtggataacgtcgagcaattcgtggatgtgagttatcagatctttaagtttatccgtacaaggatcacatcaggaatcagtatttaa

SEQ ID NO: 273 - DNA, 594 bp, Ancylostoma ceylanicum
atgttgatggttgtatcgaatgccaaaggtatagaacctgcgggaaagactcttgaaattgatgcatatgctgacgcattctacgcggctgctacggagtcggatgagtccaggaaagctcatggcaagagattgagtgaattcatactatctaacgatattgaacgatggagtgctgcgttcctggatccaagctggacgcatctggttattcgcccaatgcaggtcaacactttggatgatttcttctcactaatgatgcgaacaaggaatgtacggagacaaattgttgatcgagtactgaaaggaatccctataaggcctcatttcgccattagtattcgcaatgcaaaggagtctcttgagaacagctgcgaatcagattcacatacacttgtcctccgggcatcacaagattctcctgataaggccaaattcgacatcaaaaatgaactacaagagtttgagaaggacctctccttcatggactacgcccaaagtgaagatgtggataacgtcgagcaattcgtggatgtgagttatcagatctttaagtttatccgtacaaggatcacatcaggaatcagtatttaa

SEQ ID NO: 274 - DNA, 537 bp, Ancylostoma ceylanicum
atgttggcatatgctgacgcattctacgcggctgctacggagtcggatgagtccaggaaagctcatggcaagagattgagtgaattcatactatctaacgatattgaacgatggagtgctgcgttcctggatccaagctggacgcatctggttattcgcccaatgcaggtcaacactttggatgatttcttctcactaatgatgcgaacaaggaatgtacggagacaaattgttgatcgagtactgaaaggaatccctataaggcctcatttcgccattagtattcgcaatgcaaaggagtctcttgagaacagctgcgaatcagattcacatacacttgtcctccgggcatcacaagattctcctgataaggccaaattcgacatcaaaaatgaactacaagagtttgagaaggacctctccttcatggactacgcccaaagtgaagatgtggataacgtcgagcaattcgtggatgtgagttatcagatctttaagtttatccgtacaaggatcacatcaggaatcagtatttaa

SEQ ID NO: 275 - DNA, 900 bp, Ancylostoma ceylanicum
atggatgtgtttgccgtaatttttgatgacttggagccgttaattttatttttctttcagacgctcaccagctctcaccctgtatccgaggagaaattcaaggaggaagtggcaaatgcagttgatcttctctacgaaactgaccatctacactacttcttcacggatagagatggaacattaaagagctatgcgtgcagctacccgtccagcattcagccggcctactctggagttatccaggcccagtttgctcgacgatgtgctcaaacgtgttgcatcctaaccacggcaccgatgatgcatataggtgttctcgatgtctctactataccacccggctattactactatggtgcgtcagctggacgtgaatggtttattgatccgacaaacaaattcaaagatacgagcattccagacaaacatctcacaatgctcgacgaggttttcgagcaggtgtctcgtttgttggagagaaaagagttcagggtgttcacatgggtcggatcgggtcttcagaagcactatggacatttgacgatcgctcatcaggacatctatggatcggtcaatgccgcattgagtgaacaacttttcgaagagatcaatcgtatcgtgattctcgtggatcctgacggcaacatcctggacgtgcagagatcaaacctcgacatcaaagttctgttgaagggtaaaggaacaggacaacacttcaataaaggacacggaatacggatgctatgcgaaaagatgaaatgtgatttaaaagtgcgtgacctttgtggatcctacaacaacaagaacatcgcgttcgtcagttgccctgaagtgctacttggagcgatggcccaagcgacaatccgagagatcagcatcgttcgaccaagaggagaataa

SEQ ID NO: 276 - DNA, 963 bp, Ancylostoma ceylanicum
atggatgtgtttgccgtaatttttgatgacttggagccgttaattttatttttctttcagacgctcaccagctctcaccctgtatccgaggagaaattcaaggaggaagtggcaaatgcagttgatcttctctacgaaactgaccatctacactacttcttcacggatagagatggaacattaaagagctatgcgtgcagctacccgtccagcattcagccggcctactctggagttatccaggcccagtttgctcgacgatgtgctcaaacgtgttgcatcctaaccacggcaccgatgatgcatataggtgttctcgatgtctctactataccacccggctattactactatggtgcgtcagctggacgtgaatggtttattgatccgacaaacaaattcaaagatacgagcattccagacaaacatctcacaatgctcgacgaggatagcatcgtgcattttctttgtcagatctctacctttgtacctggctcaaatttgtttcaggttttcgagcaggtgtctcgtttgttggagagaaaagagttcagggtgttcacatgggtcggatcgggtcttcagaagcactatggacatttgacgatcgctcatcaggacatctatggatcggtcaatgccgcattgagtgaacaacttttcgaagagatcaatcgtatcgtgattctcgtggatcctgacggcaacatcctggacgtgcagagatcaaacctcgacatcaaagttctgttgaagggtaaaggaacaggacaacacttcaataaaggacacggaatacggatgctatgcgaaaagatgaaatgtgatttaaaagtgcgtgacctttgtggatcctacaacaacaagaacatcgcgttcgtcagttgccctgaagtgctacttggagcgatggcccaagcgacaatccgagagatcagcatcgttcgaccaagaggagaataa

SEQ ID NO: 277 - DNA, 1569 bp, Ancylostoma ceylanicum
atgttcttggattctcactgtagaaagcaagaacaatccagagaactcactcctaatccacctgcttcctcacagatcaacaacgacacaaaggaacagttcaccttcgctgacttggtgaacaaagcgaaattcgtcgggcgagcacttgtggctatgggtgtcgaaagaggcgaggttgtgatgctatgtgtggataactctcccgaagctgtgtacctcttcctcgcaatctctctggctggtgcagtggcgagcacattgtcgccgaaattgcacgctgatgaaatgcacttccaaatcgttgaatcagacacacggatagtattcgtcgatcccattgggctagcagaggttcaacaagtttttcagaacctgaacaagcctcatcggataatctgcacgggcccgcgagatctggctgaagggtgcccgattctggatgatctccattttgttgtcagcgaccacgtcaactttccaaggatccaaccgcgagcggacatcgtgtacatgccgttctcgagtgggatccacggtaaacggaaaggaattctcacctcccactatatcatgaacgcaaaggctatgatctctttcaacccccagtcctatatccatcccgagcgacatgagttcacagtggcaatgttgccttttcatcgacagcttggtctggaagccatttttatctctctccttgctggcgccaccgtcgtgactgtgtccaagttctgtgtacatactttgatgacatgtatagatcgatacaaggccaaaaccctctacctcagccctatgatcatgtcgatgatgatgaacgaagcggagaaccacgaatattcgatggaaagtatgcgtacggtcatcaacggcagcgccgcggtttccagggaactgttcgacgattttcgggaatcgttcccacttgtggagaatatcatctcgacctatggtatgaccgaaaccggtttgataacgcggaccgtgcccagtaagaagtactctcattcatgcggtaaactggctgcgaatctctcgctgaaggtggttgatctcgtcagcgggcgtgtgctgggacctcgtcagaagggtgtgatttacgtgagggggaccagcgtgatgtcaccctacctgaataatgaagaggctacgagggaacaaatcagaggaggttggaggaaaacaggtgacataggatattacgacgaggatgagaacgtctacctcgtcgacaagttcaaggagatgatcaaagtacatggctaccaggtaataccttcggagttggagacattgctggtaacacaccctggcgtcgtcgaagctgctgtggtcgcgatttcagaccaagaggctggagagagaccagttgcttttgttgttctaaataaggataatcctgtcggcacaaaggaaatcatggattacgtcaacgaacgagttgtgcgatacaagcgactagtgcgagtgaacgtcgctcagaccctccctcgctcgccatgcggttcgctgcttcggcggttgcttgccgaggcggctgtgctcagcgtgtgcaacatgccgtaa

SEQ ID NO: 278 - DNA, 1638 bp, Ancylostoma ceylanicum
atgggtgaagacatacgtatgacatccgaattgtgtagttataagggctgcgatcctgtgagtgtaaggactgcgatgcttcgctaccgcaatcttagcaggattgcaagagaactcactcctaatccacctgcttcctcacagatcaacaacgacacaaaggaacagttcaccttcgctgacttggtgaacaaagcgaaattcgtcgggcgagcacttgtggctatgggtgtcgaaagaggcgaggttgtgatgctatgtgtggataactctcccgaagctgtgtacctcttcctcgcaatctctctggctggtgcagtggcgagcacattgtcgccgaaattgcacgctgatgaaatgcacttccaaatcgttgaatcagacacacggatagtattcgtcgatcccattgggctagcagaggttcaacaagtttttcagaacctgaacaagcctcatcggataatctgcacgggcccgcgagatctggctgaagggtgcccgattctggatgatctccattttgttgtcagcgaccacgtcaactttccaaggatccaaccgcgagcggacatcgtgtacatgccgttctcgagtgggatccacggtaaacggaaaggaattctcacctcccactatatcatgaacgcaaaggctatgatctctttcaacccccagtcctatatccatcccgagcgacatgagttcacagtggcaatgttgccttttcatcgacagcttggtctggaagccatttttatctctctccttgctggcgccaccgtcgtgactgtgtccaagttctgtgtacatactttgatgacatgtatagatcgatacaaggccaaaaccctctacctcagccctatgatcatgtcgatgatgatgaacgaagcggagaaccacgaatattcgatggaaagtatgcgtacggtcatcaacggcagcgccgcggtttccagggaactgttcgacgattttcgggaatcgttcccacttgtggagaatatcatctcgacctatggtatgaccgaaaccggtttgataacgcggaccgtgcccagtaagaagtactctcattcatgcggtaaactggctgcgaatctctcgctgaaggtggttgatctcgtcagcgggcgtgtgctgggacctcgtcagaagggtgtgatttacgtgagggggaccagcgtgatgtcaccctacctgaataatgaagaggctacgagggaacaaatcagaggaggttggaggaaaacaggtgacataggatattacgacgaggatgagaacgtctacctcgtcgacaagttcaaggagatgatcaaagtacatggctaccaggtaataccttcggagttggagacattgctggtaacacaccctggcgtcgtcgaagctgctgtggtcgcgatttcagaccaagaggctggagagagaccagttgcttttgttgttctaaataaggataatcctgtcggcacaaaggaaatcatggattacgtcaacgaacgagttgtgcgatacaagcgactagtgcgagtgaacgtcgctcagaccctccctcgctcgccatgcggttcgctgcttcggcggttgcttgccgaggcggctgtgctcagcgtgtgcaacatgccgtaa

SEQ ID NO: 279 - DNA, 939 bp, Ancylostoma ceylanicum
atgttcatatcattttggcgatatctcttcaagattcgagctctaatcctcgctgtacgctactatgctaggaagaacgtggatattgtggctttctccttgggtgttcccattgctaggaaggctatcttaggaggacgatgcgtagacacaaacgaagatttgggcggaccactaactcgctacgtggatactttcttaggaatagcaggtccgaatcacggaataacactcaaggtggctggattatcactaccaacgtgtgctcttggtacacttcccatatgtgacagagttgtgggattgtactcaggtttctgccccatggaaagtgaatttcttaatgacataaatcggaatcaccactatgaagggaaggccgtcttctccatttacagtcacattgatgataggattggctacaaagtttgtgacaaggtaactgcatctattactggtgaggatggacataaatcattccggaacttgaatcacgacgacactctcgacactactcatcagttacaaatctcgatgatacaaggacatttcggcgaaggattaaaaagcgaacctagagaaaaagaggacgaggaggacagacctcggaataatgcgacaaagcccctggacatcggagacctcagcgttagcgatatggctgtggataacagcgttccagtcgatgtgctaccaaaagtggaattttttgacaactcgtcagaaatcaacatggacagaattagaaggttttttcgtgaacagaaaaatgatttatggaacagcgatcgaatcagctcatcctcaaaaacagaatcgcaggagagtggtgatggctcatggtttcacagaagctctatgttacatgataacaacgacagctctagctctccagaaagagatggatatcatacaagaatatcaataaaacttcagtaa

SEQ ID NO: 280 - DNA, 1041 bp, Ancylostoma ceylanicum
atgtcatttgttcaaccttatagagcggctggctatacggatagcgaattatactcaacctcgtatgcaaatggagcgaggctcaatcctttacagtggaccctgtactcgatgaagtgcgagtacgtaaagcagattcgagctctaatcctcgctgtacgctactatgctaggaagaacgtggatattgtggctttctccttgggtgttcccattgctaggaaggctatcttaggaggacgatgcgtagacacaaacgaagatttgggcggaccactaactcgctacgtggatactttcttaggaatagcaggtccgaatcacggaataacactcaaggtggctggattatcactaccaacgtgtgctcttggtacacttcccatatgtgacagagttgtgggattgtactcaggtttctgccccatggaaagtgaatttcttaatgacataaatcggaatcaccactatgaagggaaggccgtcttctccatttacagtcacattgatgataggattggctacaaagtttgtgacaaggtaactgcatctattactggtgaggatggacataaatcattccggaacttgaatcacgacgacactctcgacactactcatcagttacaaatctcgatgatacaaggacatttcggcgaaggattaaaaagcgaacctagagaaaaagaggacgaggaggacagacctcggaataatgcgacaaagcccctggacatcggagacctcagcgttagcgatatggctgtggataacagcgttccagtcgatgtgctaccaaaagtggaattttttgacaactcgtcagaaatcaacatggacagaattagaaggttttttcgtgaacagaaaaatgatttatggaacagcgatcgaatcagctcatcctcaaaaacagaatcgcaggagagtggtgatggctcatggtttcacagaagctctatgttacatgataacaacgacagctctagctctccagaaagagatggatatcatacaagaatatcaataaaacttcagtaa

SEQ ID NO: 281 - DNA, 930 bp, Ancylostoma ceylanicum
atgaagtgcgagtacgtaaagcagattcgagctctaatcctcgctgtacgctactatgctaggaagaacgtggatattgtggctttctccttgggtgttcccattgctaggaaggctatcttaggaggacgatgcgtagacacaaacgaagatttgggcggaccactaactcgctacgtggatactttcttaggaatagcaggtccgaatcacggaataacactcaaggtggctggattatcactaccaacgtgtgctcttggtacacttcccatatgtgacagagttgtgggattgtactcaggtttctgccccatggaaagtgaatttcttaatgacataaatcggaatcaccactatgaagggaaggccgtcttctccatttacagtcacattgatgataggattggctacaaagtttgtgacaaggtaactgcatctattactggtgaggatggacataaatcattccggaacttgaatcacgacgacactctcgacactactcatcagttacaaatctcgatgatacaaggacatttcggcgaaggattaaaaagcgaacctagagaaaaagaggacgaggaggacagacctcggaataatgcgacaaagcccctggacatcggagacctcagcgttagcgatatggctgtggataacagcgttccagtcgatgtgctaccaaaagtggaattttttgacaactcgtcagaaatcaacatggacagaattagaaggttttttcgtgaacagaaaaatgatttatggaacagcgatcgaatcagctcatcctcaaaaacagaatcgcaggagagtggtgatggctcatggtttcacagaagctctatgttacatgataacaacgacagctctagctctccagaaagagatggatatcatacaagaatatcaataaaacttcagtaa

SEQ ID NO: 282 - DNA, 894 bp, Ancylostoma ceylanicum
atgcagtttctcgttgcaacggtcttgatcgggagcgtttttgctgagttctcgccagatttctccactttcctcgccagttattatgggccatatgtgagggaccagatggagcgacgagatctcgccggcaaaggatcgttcggtggaaaagcggatcggtcagagagattgagaaaccaaccgattgttttcgtgcatggcgtctcggacacggcaggcgaaaagatgatgcaggcggccaactggttcaaagcaaaaggatacaagaacagcgagctgtattctacaacgtactttaacggcgcacaagggaatcccctgaagtgggtggaatacggtatgcgatgcgagtacgtcaaacaggtccgcgcgctaatcgtcgccacacggctctacaccggtcgggccgtcgatgtgatcgcgttctcactgggcgtaccagtgtcgaggaaggcaattctgggagggcgatgtgtcgactctggtgaataccttggcggacccctaaccaagtacattgacacctttgtgggagtagctggtccgaatcacgggatcagcctccaggtgggaggcgttgcaatccctggatgcgtgttcagtgtgattccagtctgcaatcaagtgaccggcctctattcgggcttttgccctagcgagagcgaattccttcaggatatcaatagccaagttgggtacgaaggcaaacacatcttcacgatccattcgaagaaggaccagatcgtcggccacattgtttgcaatagggtgacctcacaaatcgccggccagatgggcgagaaagtcttcgagaatctcaaccacgacgacacgttccatacctctcacagtgtgcaactagcgatgattcgagaccatgttgttgtttga

SEQ ID NO: 283 - DNA, 303 bp, Ancylostoma ceylanicum
atgttgatatacttagtactcattgaggctttctcgtctttggctcgttttgaacctgccctcatacaagaaccaattctgaccaccctcgcaaagaagaacaatgtcacgattgcggtcattttgctttcatgggcgatgagccaaggagtaggagtaataccgaagtcatcaatcccaacgcaattgactgaaaatttcgaggcgacaaagttggtgttgaaggaggaagagattgaatcactgcgtaaactaaaccgaaataagaattacatcgactgcgcaggatggcgcgtactgtaa

SEQ ID NO: 284 - DNA, 471 bp, Ancylostoma ceylanicum
atggaccctgaagatccagctggtggagcacggaaactagttctggagtcgctaaaacagctcagagtgagctaccttgatatggtccttattcattacccaaaagcgataaaatgtgatgagaaagacacgaagaacaaggagcatcgcaagctaacttatctggaactggaaaaaatgaaagcggagggcaagattcgatccgtcggcgtctctaactatgaagtatatcacatggaagaaattaaaagcttcagcaagatggtaccatgcacaaaccaagttgaattccaccctcatctcactagagaagaactgagacagtactgtaggaaggagggcatttttctacaggttcgtgtatcacttttgaatggacttatacaccccatttcttctataatagaaaatatttccttacgacgcgccaatggctgtacacagcttaatggcgttgctgaacaagcataa

SEQ ID NO: 285 - DNA, 630 bp, Ancylostoma ceylanicum
atggaccctgaagatccagctggtggagcacggaaactagttctggagtcgctaaaacagctcagagtgagctaccttgatatggtccttattcattacccaaaagcgataaaatgtgatgagaaagacacgaagaacaaggagcatcgcaagctaacttatctggaactggaaaaaatgaaagcggagggcaagattcgatccgtcggcgtctctaactatgaagtatatcacatggaagaaattaaaagcttcagcaagatggtaccatgcacaaaccaagttgaattccaccctcatctcactagagaagaactgagacagtactgtaggaaggagggcatttttctacaggctttctcgtctttggctcgttttgaacctgccctcatacaagaaccaattctgaccaccctcgcaaagaagaacaatgtcacgattgcggtcattttgctttcatgggcgatgagccaaggagtaggagtaataccgaagtcatcaatcccaacgcaattgactgaaaatttcgaggcgacaaagttggtgttgaaggaggaagagattgaatcactgcgtaaactaaaccgaaataagaattacatcgactgcgcaggatggcgcgtactgtaa

SEQ ID NO: 286 - DNA, 855 bp, Ancylostoma ceylanicum
atgaaagaaaaaccgaatattgagaaagatggtttgaccaatcaagaatttgcagaaacaccgataaatctggaagcgatccttgaaccgcaaaaaaaaatcaaaaacgaaacactggcgaaaatcagctgtataaatgatgctgatccatcagattcatgtccacttaatcataccttaggaacggccaaatttttcatgctgctctctacgtggaattggtggggtaatcaccaaggtccaagaacgattgaaatctcaaacacaaaaatttccatgggtgatgcgataggtgctaagcctggatgtgtaccggaaataacggaactccttcctaagcatgggcttacacgtgctgatgttttcatcaccacgaaattccacatggaccctgaagatccagctggtggagcacggaaactagttctggagtcgctaaaacagctcagagtgagctaccttgatatggtccttattcattacccaaaagcgataaaatgtgatgagaaagacacgaagaacaaggagcatcgcaagctaacttatctggaactggaaaaaatgaaagcggagggcaagattcgatccgtcggcgtctctaactatgaagtatatcacatggaagaaattaaaagcttcagcaagatggtaccatgcacaaaccaagttgaattccaccctcatctcactagagaagaactgagacagtactgtaggaaggagggcatttttctacaggttcgtgtatcacttttgaatggacttatacaccccatttcttctataatagaaaatatttccttacgacgcgccaatggctgtacacagcttaatggcgttgctgaacaagcataa

SEQ ID NO: 287 - DNA, 1014 bp, Ancylostoma ceylanicum
atgaaagaaaaaccgaatattgagaaagatggtttgaccaatcaagaatttgcagaaacaccgataaatctggaagcgatccttgaaccgcaaaaaaaaatcaaaaacgaaacactggcgaaaatcagctgtataaatgatgctgatccatcagattcatgtccacttaatcataccttaggaacggccaaatttttcatgctgctctctacgtggaattggtggggtaatcaccaaggtccaagaacgattgaaatctcaaacacaaaaatttccatgggtgatgcgataggtgctaagcctggatgtgtaccggaaataacggaactccttcctaagcatgggcttacacgtgctgatgttttcatcaccacgaaattccacatggaccctgaagatccagctggtggagcacggaaactagttctggagtcgctaaaacagctcagagtgagctaccttgatatggtccttattcattacccaaaagcgataaaatgtgatgagaaagacacgaagaacaaggagcatcgcaagctaacttatctggaactggaaaaaatgaaagcggagggcaagattcgatccgtcggcgtctctaactatgaagtatatcacatggaagaaattaaaagcttcagcaagatggtaccatgcacaaaccaagttgaattccaccctcatctcactagagaagaactgagacagtactgtaggaaggagggcatttttctacaggctttctcgtctttggctcgttttgaacctgccctcatacaagaaccaattctgaccaccctcgcaaagaagaacaatgtcacgattgcggtcattttgctttcatgggcgatgagccaaggagtaggagtaataccgaagtcatcaatcccaacgcaattgactgaaaatttcgaggcgacaaagttggtgttgaaggaggaagagattgaatcactgcgtaaactaaaccgaaataagaattacatcgactgcgcaggatggcgcgtactgtaa

SEQ ID NO: 288 - DNA, 1263 bp, Ancylostoma ceylanicum
atgatgctttctcgcctcatttccgaatcacttttacaggtgaaaagcgcagtgaatatagccctcacatgtggctatcgtctatttgatacagcaaagtattacaaaaatgagcctgaactcggagcagcattggagaggacctattccctctcaaagacggcactcacagaaattcccgagcttgagcttttgacgcgatttgcggtagcggcgtgtactgaacactttataacgctgaaaacagtcgaaatctccgaaatcgctcttttctggaacccttcagctcatcgctttcaagcagaaacaccgataaatctggaagcgatccttgaaccgcaaaaaaaaatcaaaaacgaaacactggcgaaaatcagctgtataaatgatgctgatccatcagattcatgtccacttaatcataccttaggaacggccaaatttttcatgctgctctctacgtggaattggtggggtaatcaccaaggtccaagaacgattgaaatctcaaacacaaaaatttccatgggtgatgcgataggtgctaagcctggatgtgtaccggaaataacggaactccttcctaagcatgggcttacacgtgctgatgttttcatcaccacgaaattccacatggaccctgaagatccagctggtggagcacggaaactagttctggagtcgctaaaacagctcagagtgagctaccttgatatggtccttattcattacccaaaagcgataaaatgtgatgagaaagacacgaagaacaaggagcatcgcaagctaacttatctggaactggaaaaaatgaaagcggagggcaagattcgatccgtcggcgtctctaactatgaagtatatcacatggaagaaattaaaagcttcagcaagatggtaccatgcacaaaccaagttgaattccaccctcatctcactagagaagaactgagacagtactgtaggaaggagggcatttttctacaggctttctcgtctttggctcgttttgaacctgccctcatacaagaaccaattctgaccaccctcgcaaagaagaacaatgtcacgattgcggtcattttgctttcatgggcgatgagccaaggagtaggagtaataccgaagtcatcaatcccaacgcaattgactgaaaatttcgaggcgacaaagttggtgttgaaggaggaagagattgaatcactgcgtaaactaaaccgaaataagaattacatcgactgcgcaggatggcgcgtactgtaa

SEQ ID NO: 289 - DNA, 309 bp, Ancylostoma ceylanicum
atgatgctttctcgcctcatttccgaatcacttttacaggtgaaaagcgcagtgaatatagccctcacatgtggctatcgtctatttgatacagcaaagtattacaaaaatgagcctgaactcggagcagcattggagaggacctattccctctcaaagacggcactcacagaaattcccgagcttgagcttttgacgcgatttgcggtagcggcgtgtactgaacactttataacgctgaaaacagtcgaaatctccgaaatcgctcttttctggaacccttcagctcatcgctttcaagcaggttag

SEQ ID NO: 290 - DNA, 792 bp, Ancylostoma ceylanicum
atggagactgctgttgatgctgcattgggtgccggctaccgtctctttgataccgctaagttctacttcaacgaagccgatttgggcgaagcccttcaggtctgtcttcctcgtcacaatcttaagcgtgaagatgtctacattactaccaagatctatccaacgagtagcagtggtttctacgaagaagttgagagaactgtagtagaatcgctgaacgctcttcaaacaacctacttggacctcgtgttgatacacttcccgaagacgaaggagtcatcgacggatgacccaaataacgctacccatcgcaaaaacacgtatttagctctggaaaaaataaaagcaaatggaaaagttcgttctgtgggtgtgtcgaactatgaaatacatcacattgaagagatcaagaagtatggccaggatttgcccgcagtgcttcaagtcgagttccatcctcattttacacgggagcatttgaaggactactgcacaagcaacggaattttcttccaggcgttctcttcgctagcccggcacaatgaagaactcctaggacatgaaaatgttaggaaactagcaaaaaagtacaacacttcagcacagattgttcttctctcatgggcactaagccaaggtgtgggaattatacctaagtcagctcagcctctgagaatagcggagaacatgaagacaaccgaaatccaactggacggagatgaaattatcctgttgaagaacctgaacaaggataagaactacgtgcggtgcgaaggatggctggttctttga

SEQ ID NO: 291 - DNA, 963 bp, Ancylostoma ceylanicum
atggagactgctgttgatgctgcattgggtgccggctaccgtctctttgataccgctaagttctacttcaacgaagccgatttgggcgaagcccttcaggtctgtcttcctcgtcacaatcttaagcgtgaagatgtctacattactaccaagatctatccaacgagtagcagtggtttctacgaagaagttgagagaactgtagtagaatcgctgaacgctcttcaaacaacctacttggacctcgtgttgatacacttcccgaagacgaaggagtcatcgacggatgacccaaataacgctacccatcgcaaaaacacgtatttagctctggaaaaaataaaagcaaatggaaaagttcgttctgtgggtgtgtcgaactatgaaatacatcacattgaagagatcaagaagtatggccaggatttgcccgcagtgcttcaagtcgagttccatcctcattttacacgggagcatttgaaggactactgcacaagcaacggaattttcttccaggcgttctcttcgctagcccggcacaatgaagaactcctaggacatgaaaatgttaggaaactagcaaaaaagtacaacacttcagcacagattgttcttctctcatgggcactaagccaaggtgtgggaattatacctaagtcagctcagcctctgagaatagcggagaacatgaagacaaccgaaatccaactggacggagatgaaattatcctgttgaagaacctgaacaaggataagaactacgtgcggtgcgaaggatggctgttaatcttctcggacggcatgtccagtcttcaaaatgttaaaggaggagctgttaaattaaattctggttactacatacctctatttggccttggtacttacgaactcacaggaaatgaggccttcaattcggagcagcaaacattgatgaatatcctcaatagatgcggccgattgtga

SEQ ID NO: 292 - DNA, 210 bp, Ancylostoma ceylanicum
atgaaaagtcacgatggtgaacctgttattttaatcttctcggacggcatgtccagtcttcaaaatgttaaaggaggagctgttaaattaaattctggttactacatacctctatttggccttggtacttacgaactcacaggaaatgaggccttcaattcggagcagcaaacattgatgaatatcctcaatagatgcggccgattgtga

SEQ ID NO: 293 - DNA, 1212 bp, Ancylostoma ceylanicum
atgtgtgaagagggatgtgaagagattctactcctttgtacgcctcgagatggtcgcgaacatccagaatcccctcggataccacgtgacctgccagaatggaacgagaaacttcctggaacgttgccgaagattgatattgaactcgatgatccagtactgaaaccattctctagtggaactggtggactaccacgttgcgtgcttctgagccataagaattacagtgcagccacagcaattctgaaaaaggctttgtttgaccagcttctgtctgagagttgccgaaaaacagtagccgttctccctttctaccatgcttctggcttctgggcgttgctgtattgtcttctagaaggatgtcatactataataatgaaaacgtttcatccagtgactatgctggagataattcaaaagcatgaggtggatactttgaatgtcgtgccatctatcctctcattcctttgtcgagtggatactgaacgattcaacctctcctctcttcgaaatgtactctgtggctcgagtcctctgggaaaagaacttagcaagacattcctagagcgatttccttctgtaaggaatttgatccaaggctatggtatgactgaagtggtagttctcagccacattactcctctcggacttcttgatgaaaaacgactgggcagctgtggaaaactgttaccaggttttgaagctatgctaaaagacgagaacgactccatcattgacggcccaaaccgttcaggagaactctacttaaaatccccaactgtcatgatgggatatttcaatacggatgaggattcttttgtggacgactggctcagaactggagatgttttatactacgacgaggatggtttttactatgtggtcgaccgcatcaaggatctcataaaagtcaatggggttcaagtctccccctcgcagctggaagacgtcatcctaacgcacccatccgttaaagaagttggagtgatcggcattgcccaccccgagagcggtcaggttccaaaagcttttgtcgtactgcacgatggtgttgacgaacagcttgctcgtgttagtattcgagcgcttgttgcagaaaaattcgccccaacgaagcatttgcgaggaggaattgaagtatgcaatgagctgcccaaaacgggaagtggaaagataaagcgaagtgaattgcggaagagatttgcgtcgtga

SEQ ID NO: 294 - DNA, 4827 bp, Ancylostoma ceylanicum
atgagcgacagcgacgatagcgatttcttcgtggacgagtctcccaaaaagaaagctccggctaaaaagccggctggcgaaaagaaggcccctgccaagccaaaggagcctaaagagaagaaggagaaagtcgctgatatttcgatgacaatgactgaggaggataagaatgtgttcacgaacatcgatcaagcgtcaaaaaccggcaaaaaactcgcgattgaagacatttaccaaaagaagtcacaactcgagcacattctccttcgtcctgacacatacattggatcagtggagtacacggagaaaactccaatgtggatttatgacttggaaactgaaaagctcgtgatgaaggatatccaatatgtgccaggattgtacaaaattttcgatgaaattcttgtgaatgctgccgataataagcaacgtgatcctaagatgaactgtatcaaaattaacatcgacaaggagaaaaaccagatctcaatatacaacaacgggaaaggtattcctgttgttcaccacaaagtggaaaatatgtatgtgccggaaatgattttcggaacgctactaacgtcatctaactacgatgatagccagagaaaggttactggtggtcgtaacggttatggtgcaaagctgtgtaacatcttctccaccgagtttacgcttgagacatcatcaaaagagtatggaaaagcgttcaaacagacatggattaacaatatgacgaaagacaaagactgccagattgtcaaggctgctggagaggactacacaaagattacattcaaaccggatctgaccaagttcaaaatgaaggagctggatgatgacattgtcggactgatgtgccgacgtgcttatgatgttgctggtagcaccaagggtgtcaaagtgctgctgaatggaaaagttttgcctgttcaaggattcaagcagtacgtggagcagtacactaaagatcttactggaccaactggcgagccgatcaaggttgtgtatgaatcggtcaacgaacgttgggaggtagctctgacagtctcagaaaaaggtttccagcaagtatcgtttgttaacagcattgctaccacgaagggtggtcgccatgttgactacgtggcagaccaaatggtctcgaagctgattgacgtcatcaaaaagaaagttggcaagagtacagtgaatgtgaagccgttccaagtaaaaaatcacatgtgggtgtttgtgaactgtttgattgaaaatcccactttcgactcgcaaacgaaggagacgatgacactgcaggcgaaatcgttcggttcaaagtgtgaacttagcgagaagttctccaagcaggctattaattgcggagttgtggatgcggtacttgcctgggtgcgattcaaacagcaagaggatatgaacaagaagtgcagcggaaagaaggctaccaagctgaagggcatccccaagcttgaagatgctaatgacgctggaacgaagaactcgcagctgtgtacgcttatcctcactgagggagactcagccaaaactttggctgtttctggtcttggtgtggtcggtagagacagatatggtgtattcccgctccgtggtaagctgttgaatgttcgcgaaggcaatatcaagcaggttgctgagaatgctgagatcaacgcactgatcaagattatcggccttcagtacaagaagaagtatgagactgaagaagatttcaaatcgctacgttatggaaaagtgatggtgatggctgatcaggatcaggacggatctcacatcaaaggacttgtgataaacttcatccatcacaactggccgagtcttattcagaggaactttgttgaagagttcatcacacctatcgtcaaggcaacgaaaggcaaagacgaattgtcattcttttcaatccctgagtataatgagtggagaaataatacagacaactggaaaacgtacaagatcaagtactacaaaggattgggtacttccacctcgaaagaggcgaaggagtacttctccgacatggttcgccatcgtattcgcttcaaatacggtggagctgaagacgacaacgcagtagacatggcgttttccaagaagaagattgaagaacgaaaggactggctgacgaaatggatggcagagaagaaggagcgtcgaaccaggggactagaagaggaatatctctacaacaaagacactcgtgctgttaccttcagtgattttgtgaacaaggaacttgtcctcttctccaacactgataatgaacgttccattcccagtcttgttgatgggttcaaacctggtcaacgaaaggtgttgttcgcttgcttcaagcgtgccgataaacgtgaggtgaaggttgctcaactggctggtgctgttggtgaattgtcagcttaccatcacggtgaagcgtcattgatgggtaccatcatcaacttggcgcaggatttcgttggctccaacaatgtgaaccttctgcttcccattggtcagttcggtactcgactccagggagggaaggacagtgcgtcccctcgttatattttcacacagctcaatcccgtggctcgtacaattttcccagttcctgatgacaatgttctgcggttcctgtttgaagaaaatcaaagaattgaaccggagtggtactgtcccatcataccaatggttttggttaatggagcatcaggtattggcaccggctggtccacgtctatccacaactacaatcctcgtgagatctgtgaaaatatgaggaagctgatcagaggagaacagacgaagccaatggcaccatggttcaaaggtttccgtggaaccatcgaacaactggatccgtctcgctacgtgtgctccggcgaagtcgctgtcttgagcgatgacactatcgaaatcaccgagctgccaataaagacttggacccagacctacaaagagtcggtgttggagcctatgcttgagtccagcgaaaagaagacaccgattatcagtgacttcaaggagtaccacactgacacgaccgtacggttcgtcattaaggtggccagcggaaaactgaaggagcttgaagccgagggattgcacaaggtgttcaaactgcaaactgtgctgaataccacctcgatggttctgttcgatgcttccgggtgccttcgtaagttcaacactcctgaagagatttgcgcggagttctttgagactagaaagcagaagtacattgaaagaaaggcgtttatggaaggaatgctgcgagcacaatctaatcgcctcaccaatcaggctcggttcattctggcaaaaatcaaaggagaaattgttatggagaacaagaagaaggcggctatcgttgaccagctcattaagaaaggctttgatcctgatccagtgaagaaatggaaggaaatccagaagaagaaggagttagaacaaagtggtgaatatgatgcaacagaggaggaggagcaggaagatgaaggaggtagcggagaccaagaattggagggcaagctgtcagactacgattatttggttggaatggcgctcatcaaactttctgaggaagagaagaacaagctcctcaaagaaagtgatgataagctgagagagctccgagaccttgaagcgaaatcctgggctgatctgtggaatgctgacttggataccttcttggaggcgctttctaaacaggaagctaaagagaaggctgatcaagaagttagcattaagaatgcgatgaagaagttcaccaaagaggagaagccaaagggcaaaaaggcggctgcgtttgctgcggaagtattcccatcaaaggacggtattcgtatcgagccaggcatagataaggccctcaaggaaaagtatgacaagataaaggctgctgctaccagggagaagaagcccaaggtgcccaaggagccgaaagaaccgaaaaagccaaagaaggaaggtggtgatatcaagaagttcatgtcggaggaaaagaaaagtccgaagaagaaaaagaaggacgaatgggattcggatgccagctctagtgaatttagcgataacgatgatccggaagaaagtgcgctatttgatgatgatgaggacgttgaagaagtgattccaaagaagaaggatcgtgcgtcgaggggagcgcctaagcgctattctgatgcggatgatagcgtagagaatggtcatattggtggaggtgatgctcccgacgatgttgttacgattgatgaagatgactcaccagtgaagccggaaccgaaaaagtctgcacctaaacggaaggtggttgaaagcgacggcagttttgatggcgaaccttcacccaaaaagaagaaggccgaaccgaaaaagcctgctgcgaagaaagcagttgatggagctggcgatgaaccagcacagaagaagagcaagaagcctcagaaacctgccgatgacagcattttcgaaatccccgatgacgaagacgaggatactccacctcggaagaaagctccagcaaaaaaggcagaatctaatggtgcaggcccggctaagaaggcagccaagggaaaagcaaagaaagaaaatgggaccagtgactcgccgaagatgacagatttctttggaaagaagagtaagggtaagaagaagagtggtggttcggattcagaagatgacatcgtcattgaagatgatgagccggtggccccaagacagacaggcagaagacaagttgcaagacctaagtacgactacggaggcactgatgatgaagacgaagatgattcaccgaaaccgaggaagagaaaagttattgatagcgacagcgattag

SEQ ID NO: 295 - DNA, 738 bp, Ancylostoma ceylanicum
atgatagtgaagtcgaaactcaccgtggctacacctcaagaaccgatgcacaccactgttcttcgaaaatgtctcgaattccataaagacgatccagaacgggcagctttcttttcaaccagcgacaaaaccaacgctgtgactttcaagcaggtctacgactactcacttaatcttgcctcgtggttgatggagaacgactttaagaagggtgatgtagtgcttattagcctacggaacagctggcatttccctgtggcctgcttaggcgcttggtcagccggtttgattgtctctccggcaagtaccctgtttacagaatatgagcttcgataccaattagaagactcaacagcaaagcttataatcaccgaggaattgttattgtcgaagatgaagaaggccaatgggactggagcacggatcatttgtgtttctgagcaaaaacacgccaatgtggacgactttgtggcgattgttacaagacatcgaccagtcccagtaatgccagtatatatcgacttagcagaggatctgatgttcctagcctactccagcggtaccacaggtgctccaaagggcgtgatgctcactcatggaaatttcgcctattctttcagaggtcatatcaggaaatacgccgagatttacagtgctcagggtgtcgacggctacgttcctccgcttcactccatcgcatttcttccattttaccacgccatgggtcttttcaagtag

SEQ ID NO: 296 - DNA, 1620 bp, Ancylostoma ceylanicum
atgatagtgaagtcgaaactcaccgtggctacacctcaagaaccgatgcacaccactgttcttcgaaaatgtctcgaattccataaagacgatccagaacgggcagctttcttttcaaccagcgacaaaaccaacgctgtgactttcaagcaggtctacgactactcacttaatcttgcctcgtggttgatggagaacgactttaagaagggtgatgtagtgcttattagcctacggaacagctggcatttccctgtggcctgcttaggcgcttggtcagccggtttgattgtctctccggcaagtaccctgtttacagaatatgagcttcgataccaattagaagactcaacagcaaagcttataatcaccgaggaattgttattgtcgaagatgaagaaggccaatgggactggagcacggatcatttgtgtttctgagcaaaaacacgccaatgtggacgactttgtggcgattgttacaagacatcgaccagtcccagtaatgccagtatatatcgacttagcagaggatctgatgttcctagcctactccagcggtaccacaggtgctccaaagggcgtgatgctcactcatggaaatttcgcctattctttcagaggtcatatcaggaaatacgccgagatttacagtgctcagggtgtcgacggctacgttcctccgcttcactccatcgcatttcttccattttaccacgccatgggtcttttcaacgtgttctttacgctatacaatgggactacacaaattactatggcaagattcaatctgaaagaactcctccagcatattcaggactaccatatatcacttctcctagttgtgccctccgtgatcctagccatggtcgagtcgccgctgctcgactcctacgatctctcctcgcttgcgctggtagggtcaggcgcggcacccttgagccaaagcgttgtcgatcgactccaacaacggctccctgaagtacgggtcgtgcaaggttacggcatgacggaaacatctgttgcctcgcacataccaacgttttcgtgtccaaagggcagtgttggaacgctattgccaaatacggaaatgaagattgtctcctgtgggaagttgtgtggtccgtttgagcgaggtgagctgtggatacgcggcccacaaatcatgaagggctactggaggaggcccgaacttaccaaggaaatgttcgacagtgaaggtttcatgcgtactggtgatattgcctactatgacaaagatggatacacgtttatttgtgatcgagacaaggaactgatcaaggtcaatggaaagcaggtgtctccgactgaaatcgaagaggttttgatagctcatccgaaaataaccgattgctgtgtgattggcatacctgatgagaaacgtggagaagtgcctctggcgttcgtcgtagcgaaatccataaacgaggacagcattcacgcctatgttaaagaacggctagcgccctacaagcgattgcggggaggcatcaaattcgtagacgtgatcccaaggactccaacaggaaaaacgctgaaacggaagctgaaggacgagtatttgaaaacggtgaagccttcgcagaggagtcatatctag

SEQ ID NO: 297 - DNA, 1149 bp, Ancylostoma ceylanicum
atgataatcaagaagacattcgacgagtccgaagaaattgttgtttccaagaaggagcttcgtttgttcgtgctgaactgccttgagaaagtctcatgctcgccagctcacgcccagcaactcgccgacatcctgatctgctccgattatcgtggccactactctcacgggttgaatcgccttcacatctacgtcaacgatttggctgagaagtcaacggcgaaagatggagaaccaatcatcatcaagcaaaagggctcaacagcatgggtggacggctgcaacctgctcggacccgttgttggcaatttctgcatgaaattagctatccagaaagctcgtgaacacggcatcggatgggtggtggcgaaaaattcaaatcatttcggcattgctggatggtatgccgatgctgctcttcagcacggacttgtgggaatggccttcaccaacacgtcaccttgtgtgttccccacgaattccgctgagaaaagtcttggctcaaatcctatctgccttgcggccccggcccagaacggagactcgttcttcctcgacatggcttcgacaacagtagcctacggaaagatcgaagtcgtggatcgccgcggtggcaaacgaatcccaaggagctggggagcagacgccgatggtgtggaaacgcaggaccccaaagaagtgctgaatggtggagggttgcagccattgggaggatcagaagctacaggtggctacaaaggaactggtctttgcatgatggtggagatcctctgcggaatcatggctggctcttctttcgggaaatcaatcagaaaatggcaaacaaccgatgagaatgcaaacttgggccagtgctttgtcgccattgatcctgaatgcttcgcgcctggattcagtgaacgactgagttgtttcctcgatgagactagggacctgaaaccggttgacccttcctatcctgtacaagtagcaggtgatccagaaagagcccatatgtacatgtgcgatgagttggacggcatcgtttacaagaagagtcaactagaacatttggaaaaactcggcaacgatcttggtgtgcatatgttcaaagcaaaaaagatgaattcgcaagctctggatgacgggccaacatcgagggtacactga

SEQ ID NO: 298 - DNA, 1398 bp, Ancylostoma ceylanicum
atgcactctatatttcccaaatcgcttttttacgggaaggctctcagtatttttcttgctctgaaaaaaatcactgagcttgtacatacttatgtgccctgttttgttttcagcgttgctgtaacagatggagcgaacaacgtcaggatcatgaagaattcgacatgggagaataaaaaagtgatcgctgatgaagtcataaagtcaacgctcagtcaaagctatgacatgcggatccgcccaccaaactatgacgagaatggaaggaatgggccagtggttatcgatgtccagtgctatgtaagaagcatgtcaaatatcgatttcgtccgaatggagtacagcatgcagttgacgtttcgtcagttctggcgagatcctcgattggcttatgagaagatgtactatggtcagaaagtgccaaaattccttatacttacacagaaggatctcatttggacaccggacacttttttcatgaacgaaaagcaggctcaccgtcatgcaattgacaaactcaatgtaatgatcaggatccactcagacggcactgtcatgtattcggagcggctgtcactcactctgtcatgtgctatgtacctgcagagatatcctatggatgtgcaaacatgcgccttgctcttagcgtcctacgcgttcaccactgatgacattgtctatcaatggaaggaggacagccctatccaacaacatccaatgctgaacacttcactgccgaatttctctctcgatccagcggagaccacaatgtgcaccagcagaactacgactggagagtattcctgcatacaagccgtcttcagacttaaaaggatgttcagttactaccttgcacaagtctacgtgccttccactctgctggtgatcgtctcctgggtatcgttctggctcgacagaaatgctgttccggccagaatcactcttggagtcactactcttcttactatgactacccaggcagcatccattaacaacagcctccctgccgtgtcctacatcaaagcggtggacgtatggactggtgcttgtcttgcttttattttcgcaactgtgctagagtatgccttcgtatgctacgaggcatcgatgtataaatgcgagaatcacagctgccacgctgttgaccctgcagttgacaataaaaagccgctgagtaatccgagaaaagatagctggggagccggtaaacacgaagagcagaagttgttacgacctgttgctgaggaaagtgctccagtatacggcttccactggtggcagaagtggaaggccggcgcagatccgccaaagatgatcgacttgagatctcgcctgatattccctgctctgtttgtcatcttcaacatcatctactggacatggtattcggcgctctga

SEQ ID NO: 299 - DNA, 1248 bp, Ancylostoma ceylanicum
atgaagaattcgacatgggagaataaaaaagtgatcgctgatgaagtcataaagtcaacgctcagtcaaagctatgacatgcggatccgcccaccaaactatgacgagaatggaaggaatgggccagtggttatcgatgtccagtgctatgtaagaagcatgtcaaatatcgatttcgtccgaatggagtacagcatgcagttgacgtttcgtcagttctggcgagatcctcgattggcttatgagaagatgtactatggtcagaaagtgccaaaattccttatacttacacagaaggatctcatttggacaccggacacttttttcatgaacgaaaagcaggctcaccgtcatgcaattgacaaactcaatgtaatgatcaggatccactcagacggcactgtcatgtattcggagcggctgtcactcactctgtcatgtgctatgtacctgcagagatatcctatggatgtgcaaacatgcgccttgctcttagcgtcctacgcgttcaccactgatgacattgtctatcaatggaaggaggacagccctatccaacaacatccaatgctgaacacttcactgccgaatttctctctcgatccagcggagaccacaatgtgcaccagcagaactacgactggagagtattcctgcatacaagccgtcttcagacttaaaaggatgttcagttactaccttgcacaagtctacgtgccttccactctgctggtgatcgtctcctgggtatcgttctggctcgacagaaatgctgttccggccagaatcactcttggagtcactactcttcttactatgactacccaggcagcatccattaacaacagcctccctgccgtgtcctacatcaaagcggtggacgtatggactggtgcttgtcttgcttttattttcgcaactgtgctagagtatgccttcgtatgctacgaggcatcgatgtataaatgcgagaatcacagctgccacgctgttgaccctgcagttgacaataaaaagccgctgagtaatccgagaaaagatagctggggagccggtaaacacgaagagcagaagttgttacgacctgttgctgaggaaagtgctccagtatacggcttccactggtggcagaagtggaaggccggcgcagatccgccaaagatgatcgacttgagatctcgcctgatattccctgctctgtttgtcatcttcaacatcatctactggacatggtattcggcgctctga

SEQ ID NO: 300 - DNA, 1308 bp, Ancylostoma ceylanicum
atgtgcataatctgcagttggagcgttgctgtaacagatggagcgaacaacgtcaggatcatgaagaattcgacatgggagaataaaaaagtgatcgctgatgaagtcataaagtcaacgctcagtcaaagctatgacatgcggatccgcccaccaaactatgacgagaatggaaggaatgggccagtggttatcgatgtccagtgctatgtaagaagcatgtcaaatatcgatttcgtccgaatggagtacagcatgcagttgacgtttcgtcagttctggcgagatcctcgattggcttatgagaagatgtactatggtcagaaagtgccaaaattccttatacttacacagaaggatctcatttggacaccggacacttttttcatgaacgaaaagcaggctcaccgtcatgcaattgacaaactcaatgtaatgatcaggatccactcagacggcactgtcatgtattcggagcggctgtcactcactctgtcatgtgctatgtacctgcagagatatcctatggatgtgcaaacatgcgccttgctcttagcgtcctacgcgttcaccactgatgacattgtctatcaatggaaggaggacagccctatccaacaacatccaatgctgaacacttcactgccgaatttctctctcgatccagcggagaccacaatgtgcaccagcagaactacgactggagagtattcctgcatacaagccgtcttcagacttaaaaggatgttcagttactaccttgcacaagtctacgtgccttccactctgctggtgatcgtctcctgggtatcgttctggctcgacagaaatgctgttccggccagaatcactcttggagtcactactcttcttactatgactacccaggcagcatccattaacaacagcctccctgccgtgtcctacatcaaagcggtggacgtatggactggtgcttgtcttgcttttattttcgcaactgtgctagagtatgccttcgtatgctacgaggcatcgatgtataaatgcgagaatcacagctgccacgctgttgaccctgcagttgacaataaaaagccgctgagtaatccgagaaaagatagctggggagccggtaaacacgaagagcagaagttgttacgacctgttgctgaggaaagtgctccagtatacggcttccactggtggcagaagtggaaggccggcgcagatccgccaaagatgatcgacttgagatctcgcctgatattccctgctctgtttgtcatcttcaacatcatctactggacatggtattcggcgctctga

SEQ ID NO: 301 - DNA, 1377 bp, Ancylostoma ceylanicum
atgtcgccttctaaggacgtttatgctcgtcttgaagcagcaccagtagatgtgtcggtccttggtgagaagttgacgtttcgcaatggacgcactgctcagaaccgattcctcaaagctgctctaacggagagaataagctcatgggatccgaaagaccacaagaaacgtggcattccttcacgacgtattattaatctctacgataagtggggtcatggaaaatttggcatgatcttaacaggaaacatctgcgttgatccgtggaatctcgaagcagcaggaaacgtcatattcagtaaagaaaacgattgtattgagctcagagaagcgtgtaaggaatgggtccagatgatgaagcaggatggagctctagctgttgcacagctttcacatgcaggacgccaaactcctgagcttataaacgctcatccgttttcatgctctgatgtgcagctgacggcaaaacgacgtttcatgggttttggcaagccagtaccgttgtcattggatcagatgaaaaccgaagttgtcgatcgattcgtttatgcggcaaaactcgcctatgaacaaggattcgatggcatagaaatccacgctgcgcatggatatctcctctctcagttcatgtcaccgatcactaacaaacgtactgatcaatatggtggatcagctgagaacagaatgaggataattcgggagatatacgaaggaatacggaaggaaatcgacgcatccaccggttttcttgtgggaatcaagacgaattcagtggaattccaggacaatggtctaagtgtggatgatgcgaggctcatgtgccaaatgatggaagaatgcggcttcgattttgttgaactttctggaggaaatattgagcggctagcatcccaacacatgcgtgactcgacaaggaagcgcgaagcatttttcttggaattcgcagcgaagatccgtccagtcttcgagaaaaccgtcgtctacgtcactggtggattccgaaccgctccagctatggtgaatgcggttcgcgaagggaccactgacggtatcggtctgggcagacccatcactgctgagccagatctccccgcaaagattctacgaggcgattgtatggcagcggcggatacccaattggatccggacgattttgggattacatcgactgctagtaatacgcaaatgggtcaaatgggcaacagaccgtatgctgatctcttgaacgtctgtgacgatgttgccgatctcagcaatccagaagaggcggaaaactacaagaaagctgctgccgaatacttccgagaaatggggcaaacggcaaaacggggtgaagctattcatggcgtgctggattatgttaatgtagtcgcgtaa

SEQ ID NO: 302 - DNA, 1392 bp, Ancylostoma ceylanicum
atgtcgccttctaaggacgtttatgctcgtcttgaagcagcaccagtagatgtgtcggtccttggtgagaagttgacgtttcgcaatggacgcactgctcagaaccgattcctcaaagtaagtatgttgttggctgctctaacggagagaataagctcatgggatccgaaagaccacaagaaacgtggcattccttcacgacgtattattaatctctacgataagtggggtcatggaaaatttggcatgatcttaacaggaaacatctgcgttgatccgtggaatctcgaagcagcaggaaacgtcatattcagtaaagaaaacgattgtattgagctcagagaagcgtgtaaggaatgggtccagatgatgaagcaggatggagctctagctgttgcacagctttcacatgcaggacgccaaactcctgagcttataaacgctcatccgttttcatgctctgatgtgcagctgacggcaaaacgacgtttcatgggttttggcaagccagtaccgttgtcattggatcagatgaaaaccgaagttgtcgatcgattcgtttatgcggcaaaactcgcctatgaacaaggattcgatggcatagaaatccacgctgcgcatggatatctcctctctcagttcatgtcaccgatcactaacaaacgtactgatcaatatggtggatcagctgagaacagaatgaggataattcgggagatatacgaaggaatacggaaggaaatcgacgcatccaccggttttcttgtgggaatcaagacgaattcagtggaattccaggacaatggtctaagtgtggatgatgcgaggctcatgtgccaaatgatggaagaatgcggcttcgattttgttgaactttctggaggaaatattgagcggctagcatcccaacacatgcgtgactcgacaaggaagcgcgaagcatttttcttggaattcgcagcgaagatccgtccagtcttcgagaaaaccgtcgtctacgtcactggtggattccgaaccgctccagctatggtgaatgcggttcgcgaagggaccactgacggtatcggtctgggcagacccatcactgctgagccagatctccccgcaaagattctacgaggcgattgtatggcagcggcggatacccaattggatccggacgattttgggattacatcgactgctagtaatacgcaaatgggtcaaatgggcaacagaccgtatgctgatctcttgaacgtctgtgacgatgttgccgatctcagcaatccagaagaggcggaaaactacaagaaagctgctgccgaatacttccgagaaatggggcaaacggcaaaacggggtgaagctattcatggcgtgctggattatgttaatgtagtcgcgtaa

SEQ ID NO: 303 - DNA, 201 bp, Ancylostoma ceylanicum
atgtcgccttctaaggacgtttatgctcgtcttgaagcagcaccagtagatgtgtcggtccttggtgagaagttgacgtttcgcaatggacgcactgctcagaaccgattcctcaaagtaagctgctctaacggagagaataagctcatgggatccgaaagaccacaagaaacgtggcattccttcacgacgtattattaa

SEQ ID NO: 304 - DNA, 1863 bp, Ancylostoma ceylanicum
atgattagaaatccggtccttcacattataagactgcctgcagtaaagacttctataagagtgggttgcttttggtgctttgcctccgtagcgtcatatattttgttgagcttctgtctcagacattcgtgggggtggaatacaggtgggaatgggtccacccccagttgtacctcggggtggacccaaaatcgcgaggcacctacccccgacaatcgaaagtcgttcccccacgtgccctcgcagttgttcccccgagctcattattgggttccggcggatggggggacgaccggggttatgggcagcacgctctgctcttcttggacgtccagatacgctccctcaacccaaaaagtgggcggggcgatgggagtcctacctgcccatcacccccacgaaagtctgagtacagtaaacgtcggtaggagtgggttttttgcggactcgggaagcacgcagcgcaaccgcatcgctccagctggaatcgtcgccgtgaaggaagtccattctcgtcttccagcaaaaggggcagacgtctccatcctcggacaagaattgacgttccgaaatggtcgcactgctcaaaaccggttcttaaaggctgctctaacggagagaataagctcgtgggatcccaaggatccttcgaagcgtggcattccatctcagcgtctcatcaatctctatgataaatggggtcatggcaaatttggcatgattcttacaggaaacatatgcgttgatccgtggaacctcgaatctgcaggaaatgtcgtgttcagcaaggaaaatgacggtccagagctcagagaagctgttcaaaaattgtcggcagcaatgaaacaagatggagcactagccattgcacaaatctcgcacgccggacgacaaacaccagaagtagttcacgcgcacccgttctcgtgttctgatgtacagttgaaggctaaaagacgttttatggggttcggcaaaccgattccgctgtcgttggagcagatcaaaacggaagtgatcgatcgattcgtattcgcagctaaattcgcgcgggagcatggctttgacggagttcaaatacatgccgcccatggatacctgctctccggatttatgtcgccgacaactaatactcgcaccgataagtatggtggatcaccgcagaatagaatgagagtgatccaggaggtattcgaaaacataaggaaggagattgatgcttccactggtttcctggtaggtgtcaagacgaactctgtggaattccaggagaagggtttaagtatagcagatgctaaactgatgtgccgaatgatggagagatgcggatttgactttgtggagctctccggaggaaatatcgaaataccagctttccgacatatgcgtgactcaaccagaaagcgcgaggcatttttcctagacttcgcagaacagattcgcccagtttttgaaaaggccatcgtttacgtcactggtgggttccggacagctccagctatggtgaatgcgatctgcgacggaatcactgatggtataggactaggaaggccaatcactgccgaaccagatctccctgcgaaaatccttagaggtgagtgtctgtcagcggcggacaccaaactggacccggatgattacatgcagacagctacggctagtaatatgcaaatgggacaaatgggcaagagaccgtatgctgagcttaagaacgtatgtgacgatatcgctgatctgagtaatccgaaagaagcagaaaactacaagaaagcagcggagcaatacttcaaagagatgaaagaaacagccgacagaggtgaacctatacatggcgtgctggaatatgtaaatatagtctcatag

SEQ ID NO: 305 - DNA, 534 bp, Ancylostoma ceylanicum
atgcagtgtggattcgcattccttgaagctggagctgtacgtagcaagaacaccacaaatattctgataaaaaatctgctcgattcatgtattgcaattatcggctactggtcgcttggctgggcatttgcgtacggcgactcctcgaataacgttattggactattcattggtcacactcagttcttcctggctggatttactaactatccgaagtttttcttccaatatgtgttcgccgccacatcggccaccatcgtctctggagctgtggcggaacgctgcgaatttgccaactacatcacatactgtactgttatatcaacattcgtttatcctatactaactcactggggatggcatccacagggctggatgtacctgggcattcaaacaaacgatattcacactacgtacttggtgagtgttcgtggcgttaatcgtttgctgaaaatttacttctacactacagttgctttactcatacgagtgtgtggaatccgaaatggagatggtgtgtcagttcttacataa

SEQ ID NO: 306 - DNA, 519 bp, Ancylostoma ceylanicum
atgcagtgtggattcgcattccttgaagctggagctgtacgtagcaagaacaccacaaatattctgataaaaaatctgctcgattcatgtattgcaattatcggctactggtcgcttggctgggcatttgcgtacggcgactcctcgaataacgttattggactattcattggtcacactcagttcttcctggctggatttactaactatccgaagtttttcttccaatatgtgttcgccgccacatcggccaccatcgtctctggagctgtggcggaacgctgcgaatttgccaactacatcacatactgtactgttatatcaacattcgtttatcctatactaactcactggggatggcatccacagggctggatgtacctgggcattcaaacaaacgatattcacactacgtacttgttgctttactcatacgagtgtgtggaatccgaaatggagatggtgtgtcagttcttacataagtttttcctagggcagttcctttggttgactcaatag

SEQ ID NO: 307 - DNA, 663 bp, Ancylostoma ceylanicum
atgtcatcaggggaaaactacacagcggaaataatagagctgcgaaatgaaatacatcagatgcaggcggatttcgcagagaatgacaacgccttcttcttgtgttccatggcactaataatatttttgatgcagtgtggattcgcattccttgaagctggagctgtacgtagcaagaacaccacaaatattctgataaaaaatctgctcgattcatgtattgcaattatcggctactggtcgcttggctgggcatttgcgtacggcgactcctcgaataacgttattggactattcattggtcacactcagttcttcctggctggatttactaactatccgaagtttttcttccaatatgtgttcgccgccacatcggccaccatcgtctctggagctgtggcggaacgctgcgaatttgccaactacatcacatactgtactgttatatcaacattcgtttatcctatactaactcactggggatggcatccacagggctggatgtacctgggcattcaaacaaacgatattcacactacgtacttggtgagtgttcgtggcgttaatcgtttgctgaaaatttacttctacactacagttgctttactcatacgagtgtgtggaatccgaaatggagatggtgtgtcagttcttacataa

SEQ ID NO: 308 - DNA, 1629 bp, Ancylostoma ceylanicum
atgcattgcaggcttcatcatggacacacctacagccatcacacaatgtgcagtgcttcttgctcaggaagtgatacacagactaatattagactaatagactaccatcaagttgaaaaagcgtggttcgctagtggaaatttcccgctcctacaatcgatccaccaccaagaatacccgctggaaagcggaagaacagcattctgcattgtcccagagaatgagatgagccacatgctggcgctgattgtcgctgtggtggccgcacgcgcagctcacgtgtcgcgtcgatccaccggcggcactcaggagcaggaaatcctcaatgaactgctgcgcaactacgacatgcgagtccgtccgccaccgactaattactccgatccacaagggccggtgacagtgcgtgtaaacattatgataaggatgttgtcgaagatcgacgtcgtcaacatggtacgcgatcagaaacagctgtttgttacggtaggacgagctgtgattggttggtttgtacaatttcaggaatacagtatgcagttgacgttccgtgaacagtggatcgattcgcgactcgcctactctcagctgggctaccacaatccgccaaaattccttaccgtaccgcatatcaagaataacctgtggattccagacacatttttcccaaccgaaaaagccgcacatcgacatctgatcgacaccgataacatgtttctcaggatacatccagacgggaaggtactatacagtagtcgaataagtatcacaagttcatgtcatatgcaactacaactctacccatttgatctacagtactgtgattttgatctggtcagctacgctcacactatgaaggatattgtctacgagtgggactattcggcaccggtacagttgaaacctggtgttggtagtgatttgccaaattttcaactgcaaaatatcaccactaatgatgactgcactagtcacacgaacacagaattgtccgcctacagtaatccaaaaatatttccaggatcctacgcctgccttaggatgaagctcatattgaagaggcaattcagctactatctggtacaactgtacggtcccaccacgatgattgtgatcgtctcttgggtctcgttttggatcgatatgcattcaacagctggacgagttgccttaggtgttactacactacttactatgacaactatgcaagccgctatcaacgctaaattacctccggttagctatgtgaaagtggtggatgtgtggctgggagcttgtcaaacgttcgtgttcggcgcgctgctcgagtacgcgttcgtctcctacaaggacagctcgaggaaggacgagatggcgaagagcaacgcgacgcggaaggctcagaaacgacgagacaagatggatatcccggccagtgacgcctatcaaccgccttgcacatgtcatttgtaccgtgacatgcgaccatcgctgcgggaccgccttcgacgctatttcaccaaaccggactacctaccggcgaaaatcgacttctacgcaagattctacgtgccactcggcttcctcgcattcaacatcgtctactggacgtcgtgcttcatgatggcatccaagatgtatcaaatctga

SEQ ID NO: 309 - DNA, 1593 bp, Ancylostoma ceylanicum
atgcattgcaggcttcatcatggacacacctacagccatcacacaatgtgcagtgcttcttgctcaggaagtgatacacagactaatattagactaatagactaccatcaagttgaaaaagcgtggttcgctagtggaaatttcccgctcctacaatcgatccaccaccaagaatacccgctggaaagcggaagaacagcattctgcattgtcccagagaatgagatgagccacatgctggcgctgattgtcgctgtggtggccgcacgcgcagctcacgtgtcgcgtcgatccaccggcggcactcaggagcaggaaatcctcaatgaactgctgcgcaactacgacatgcgagtccgtccgccaccgactaattactccgatccacaagggccggtgacagtgcgtgtaaacattatgataaggatgttgtcgaagatcgacgtcgtcaacatggtacgcgatcagaaacagctgtttgttacggtaggacgagctgtgattggttggtttgtacaatttcaggaatacagtatgcagttgacgttccgtgaacagtggatcgattcgcgactcgcctactctcagctgggctaccacaatccgccaaaattccttaccgtaccgcatatcaagaataacctgtggattccagacacatttttcccaaccgaaaaagccgcacatcgacatctgatcgacaccgataacatgtttctcaggatacatccagacgggaaggtactatacagtagtcgaataagtatcacaagttcatgtcatatgcaactacaactctacccatttgatctacagtactgtgattttgatctggtcagctacgctcacactatgaaggatattgtctacgagtgggactattcggcaccggtacagttgaaacctggtgttggtagtgatttgccaaattttcaactgcaaaatatcaccactaatgatgactgcactagtcacacgaacacaggatcctacgcctgccttaggatgaagctcatattgaagaggcaattcagctactatctggtacaactgtacggtcccaccacgatgattgtgatcgtctcttgggtctcgttttggatcgatatgcattcaacagctggacgagttgccttaggtgttactacactacttactatgacaactatgcaagccgctatcaacgctaaattacctccggttagctatgtgaaagtggtggatgtgtggctgggagcttgtcaaacgttcgtgttcggcgcgctgctcgagtacgcgttcgtctcctacaaggacagctcgaggaaggacgagatggcgaagagcaacgcgacgcggaaggctcagaaacgacgagacaagatggatatcccggccagtgacgcctatcaaccgccttgcacatgtcatttgtaccgtgacatgcgaccatcgctgcgggaccgccttcgacgctatttcaccaaaccggactacctaccggcgaaaatcgacttctacgcaagattctacgtgccactcggcttcctcgcattcaacatcgtctactggacgtcgtgcttcatgatggcatccaagatgtatcaaatctga

SEQ ID NO: 310 - DNA, 471 bp, Ancylostoma ceylanicum
atgcacatttttcaaaatttcaaagcagctatcataaatctatttctgaaagattgttatcaaaactacgattgctaccacattcaaggaggttacaaaggctatggtctcggagcggtggttgaaattttctgcggaatcctagctggtgcacattggggtcctaacgttcgcaaatggatgaacgcaacgtcttatgcagatctcggacaatgctttgttgctgtcgatcctgaagcatttgctcccggtttttttgagagaatgcaggagctcatcaacactttgagaagtctcccaccttatgatggcaaattaaacgtattggtggcgggcgatccagaggacaaacacgtgaagctagtaaaggaactcggcggtattccctaccacccgaatcaaatcaagaattgcgatgtactttctgagaagctcaatgtgaagaaggtgaaggttgccaaagagtactga

SEQ ID NO: 311 - DNA, 591 bp, Ancylostoma ceylanicum
atggcattcacgaacacctctccaatccagtatccgaccagggcggctaagccggcgttaggtacgaatcccataagcataggcgtgaacggcactggcggcgaccactttcttctcgatatggccacgacaacggtggccattggaaaggttgaaatcgcgaagcgacgaggggatccaattccagaatcatggggtgttgagaaaggcggaaagctcagcacagatgcagacaagattataaagggtggtggcctcttccccctaggaggatcagaaatttcgggtaagtgcctcgttttcttgaactgctctattactgccacattgtcggcatattattgcgctcagaagcaccctatgttgaatgttagggaccttcatgtttgcactccaagattatttcagcgctatcagcgtttatggaggaggaaaacggttatggaaattcctggaactcttggatttcttgaaagtcgtgcgaagttggggtataagatgtttcatggggttcatgcatgctattggtatcagcttgtcttgttaggtgcaggtttaagttcgattttaggtggaattaattttgaataa

SEQ ID NO: 312 - DNA, 954 bp, Ancylostoma ceylanicum
atggcattcacgaacacctctccaatccagtatccgaccagggcggctaagccggcgttaggtacgaatcccataagcataggcgtgaacggcactggcggcgaccactttcttctcgatatggccacgacaacggtggccattggaaaggttgaaatcgcgaagcgacgaggggatccaattccagaatcatggggtgttgagaaaggcggaaagctcagcacagatgcagacaagattataaagggtggtggcctcttccccctaggaggatcagaaatttcgggtaagtgcctcgttttcttgaactgctctattactgccacattgtcggcatattattgcgctcagaagcaccctatgttgaatgttagggaccttcatgtttgcactccaagattatttcagcgctatcagcgtttatggaggaggaaaacggttatggaaattcctggaactcttggatttcttgaaagtcgtgcgaagttggggtataagatgtttcatggggttcatgcatgctattggtatcagcttgtcttgttaggtgcaggtttaagttcgattttaggaggttacaaaggctatggtctcggagcggtggttgaaattttctgcggaatcctagctggtgcacattggggtcctaacgttcgcaaatggatgaacgcaacgtcttatgcagatctcggacaatgctttgttgctgtcgatcctgaagcatttgctcccggtttttttgagagaatgcaggagctcatcaacactttgagaagtctcccaccttatgatggcaaattaaacgtattggtggcgggcgatccagaggacaaacacgtgaagctagtaaaggaactcggcggtattccctaccacccgaatcaaatcaagaattgcgatgtactttctgagaagctcaatgtgaagaaggtgaaggttgccaaagagtactga

SEQ ID NO: 313 - DNA, 942 bp, Ancylostoma ceylanicum
atggcattcacgaacacctctccaatccagtatccgaccagggcggctaagccggcgttaggtacgaatcccataagcataggcgtgaacggcactggcggcgaccactttcttctcgatatggccacgacaacggtggccattggaaaggttgaaatcgcgaagcgacgaggggatccaattccagaatcatggggtgttgagaaaggcggaaagctcagcacagatgcagacaagattataaagggtggtggcctcttccccctaggaggatcagaaatttcgggtaagtgcctcgttttcttgaactgctctattactgccacattgtcggcatattattgcgctcagaagcaccctatgttgaatgttagggaccttcatgtttgcactccaagattatttcagcgctatcagcgtttatggaggaggaaaacggttatggaaattcctggaactcttggatttcttgaaagtcgtgcgaagttggggtataagatgtttcatggggttcatgcatgctattggtatcagcttgtcttgttaggtgcaggtttaagaggttacaaaggctatggtctcggagcggtggttgaaattttctgcggaatcctagctggtgcacattggggtcctaacgttcgcaaatggatgaacgcaacgtcttatgcagatctcggacaatgctttgttgctgtcgatcctgaagcatttgctcccggtttttttgagagaatgcaggagctcatcaacactttgagaagtctcccaccttatgatggcaaattaaacgtattggtggcgggcgatccagaggacaaacacgtgaagctagtaaaggaactcggcggtattccctaccacccgaatcaaatcaagaattgcgatgtactttctgagaagctcaatgtgaagaaggtgaaggttgccaaagagtactga

SEQ ID NO: 314 - DNA, 984 bp, Ancylostoma ceylanicum
atgagagctatgaaaaaggggcttatgggaatggcattcacgaacacctctccaatccagtatccgaccagggcggctaagccggcgttaggtacgaatcccataagcataggcgtgaacggcactggcggcgaccactttcttctcgatatggccacgacaacggtggccattggaaaggttgaaatcgcgaagcgacgaggggatccaattccagaatcatggggtgttgagaaaggcggaaagctcagcacagatgcagacaagattataaagggtggtggcctcttccccctaggaggatcagaaatttcgggtaagtgcctcgttttcttgaactgctctattactgccacattgtcggcatattattgcgctcagaagcaccctatgttgaatgttagggaccttcatgtttgcactccaagattatttcagcgctatcagcgtttatggaggaggaaaacggttatggaaattcctggaactcttggatttcttgaaagtcgtgcgaagttggggtataagatgtttcatggggttcatgcatgctattggtatcagcttgtcttgttaggtgcaggtttaagttcgattttaggaggttacaaaggctatggtctcggagcggtggttgaaattttctgcggaatcctagctggtgcacattggggtcctaacgttcgcaaatggatgaacgcaacgtcttatgcagatctcggacaatgctttgttgctgtcgatcctgaagcatttgctcccggtttttttgagagaatgcaggagctcatcaacactttgagaagtctcccaccttatgatggcaaattaaacgtattggtggcgggcgatccagaggacaaacacgtgaagctagtaaaggaactcggcggtattccctaccacccgaatcaaatcaagaattgcgatgtactttctgagaagctcaatgtgaagaaggtgaaggttgccaaagagtactga

SEQ ID NO: 315 - DNA, 747 bp, Ancylostoma ceylanicum
atggcaggctcactggagcgcaccgatcttgggttggacgcctcattaggtggaatgctcaatgacaacgacagaccgtcgaagcaagctgtgatcctagtgcatggaatcactaataaaatcacgcgatttatgccaatggtacatttcctacactcgaaaggttacaagagtggcgaggtgtacggtacgacttggggtgacgccggagtgactcccattggactggtggatatgaagtgttcatatgtgaaacagatcagatctttcatcatcgctgtacgacaatacaccggtacacaagtggacgtaattgcgtactcgatgggatcaccaatagcgagaaaagctatccttggaggacaatgtgtggatacgcgggagatcttgggtccaccactcactgaactcattgacacattcctctccgtggctggtgctaactacggtagcgctctctgcgtcgttccaattccagtcgggacctgcaatcggcgaactggtctccattgcgaatcggcatttctgcaagacatcaataatcaagcacgatacgaaggatcgtacgtttacagtatcttctcgacaactgatgaaaaggtcggcttccgcacctgtggcaaacccgtctcaccaatcagaggcggcaccggttacgtgaaaaaggatggcctcagccatgatcaagtcatggacaacactcatcacctacagatgaatttcatctcaaagcatgctcctaagtag

SEQ ID NO: 316 - DNA, 858 bp, Ancylostoma ceylanicum
atgaggcaactgatacttgccgcatggatttttgtgacagttgtccaaccggtccatgccgaattcactccacattttcgaaaatttctccacgagagctacggtgtaaacatggcaggctcactggagcgcaccgatcttgggttggacgcctcattaggtggaatgctcaatgacaacgacagaccgtcgaagcaagctgtgatcctagtgcatggaatcactaataaaatcacgcgatttatgccaatggtacatttcctacactcgaaaggttacaagagtggcgaggtgtacggtacgacttggggtgacgccggagtgactcccattggactggtggatatgaagtgttcatatgtgaaacagatcagatctttcatcatcgctgtacgacaatacaccggtacacaagtggacgtaattgcgtactcgatgggatcaccaatagcgagaaaagctatccttggaggacaatgtgtggatacgcgggagatcttgggtccaccactcactgaactcattgacacattcctctccgtggctggtgctaactacggtagcgctctctgcgtcgttccaattccagtcgggacctgcaatcggcgaactggtctccattgcgaatcggcatttctgcaagacatcaataatcaagcacgatacgaaggatcgtacgtttacagtatcttctcgacaactgatgaaaaggtcggcttccgcacctgtggcaaacccgtctcaccaatcagaggcggcaccggttacgtgaaaaaggatggcctcagccatgatcaagtcatggacaacactcatcacctacagatgaatttcatctcaaagcatgctcctaagtag

SEQ ID NO: 317 - DNA, 1659 bp, Ancylostoma ceylanicum
atgctctggcgccctcaaactgcactactatttctgcgccaagcatgtagagcccagcacttctctgcacagtaccaagttcgccgccaatggggcggcatggcaaaagtggcgaaccgcgtttgtttgatcgtcattgacggttggggtctttctgacgaatccaacggtaacgcgatcaaaaatgcgaatacgcccgtcatggatggactgtgctctggcaactggacacagattgaagcgcatggtcttcatgtcggccttcccgaaggacttatgggtaactccgaggtcggtcatcttaacattggttccggtcgtccaatctatcaggacattgtgcgtatcaatctctccatcaaggataacactcttgtcaaaaacgaggctctagtggcatcctgcaatcgcgccaagtccggaaatggacgtcttcacctggccggactggtttctgatggaggtgttcactcacacattgatcacttgttcgcgctcataaaagctatcaagcaactaggagttcctgaattgtatcttcatttctatggggacggtcgtgacacctcacccactagtggtgttggatttctggagaagacaatcgcgtttataaaggagcagaactactgtcagctagctacgattgttggccgctactacgccatggatcgtgacaaacgttgggagagaatctgtgttgcatatgaagctatgattggcggcaaaggcgaagcaactaccgttgaagaggcaccagcggtggttaagaaacgctatgcagcgcaggaaactgacgaattcctcaagcctattattattaacggagataaagctcgagtgaaggatggtgatactctcattttcttcgattacagagctgacagaatgagagaaatttctgaggtcatgggaatggaaagatacaaagactgcaaatcttcattgccccacccaaagaacctccacgttgttggaatgacgcaatacaaggccgaattccctttcccagcgcttttcccaccgctctcgaataagaacgtgttggctgagtggctggcaagtcagggtctgacgcagttccactgtgccgaaaccgaaaagtatgcacacgtgacgttcttcttcaatggtggggttgagaaacaatttgaaaatgaagagcgatgcatggtaccaagtccgaaggtggccacctatgatctactaccagagatgtcttccgctggagtagctgataaaatggtcgaacagatcaagtctaagaaacatccatttgtaatgtgcaacttcgctcctcccgatatggtcggccatactggggtttacgaagcagcagtcaaagcttgtgaggccacagataaagcaattggaagaattttcgaagcttgcaaagaaaatggttatgtactgatggtgacggccgatcatggcaatgctgagaagatgaaggctcctgatggcagcaagcatactgctcacacttgtaatcgtgtacccttcacttgcagcagtaaagacttcaagttcaagaaggcaaggattttatgtcttcaagagacgaaatcgattttcagaactaatttttttgttttttttttcagcttaccgaccgcgctcctgctctctgcgatgtggcaccgaccgttcttgctgtaa

SEQ ID NO: 318 - DNA, 1581 bp, Ancylostoma ceylanicum
atgctctggcgccctcaaactgcactactatttctgcgccaagcatgtagagcccagcacttctctgcacagtaccaagttcgccgccaatggggcggcatggcaaaagtggcgaaccgcgtttgtttgatcgtcattgacggttggggtctttctgacgaatccaacggtaacgcgatcaaaaatgcgaatacgcccgtcatggatggactgtgctctggcaactggacacagattgaagcgcatggtcttcatgtcggccttcccgaaggacttatgggtaactccgaggtcggtcatcttaacattggttccggtcgtccaatctatcaggacattgtgcgtatcaatctctccatcaaggataacactcttgtcaaaaacgaggctctagtggcatcctgcaatcgcgccaagtccggaaatggacgtcttcacctggccggactggtttctgatggaggtgttcactcacacattgatcacttgttcgcgctcataaaagctatcaagcaactaggagttcctgaattgtatcttcatttctatggggacggtcgtgacacctcacccactagtggtgttggatttctggagaagacaatcgcgtttataaaggagcagaactactgtcagctagctacgattgttggccgctactacgccatggatcgtgacaaacgttgggagagaatctgtgttgcatatgaagctatgattggcggcaaaggcgaagcaactaccgttgaagaggcaccagcggtggttaagaaacgctatgcagcgcaggaaactgacgaattcctcaagcctattattattaacggagataaagctcgagtgaaggatggtgatactctcattttcttcgattacagagctgacagaatgagagaaatttctgaggtcatgggaatggaaagatacaaagactgcaaatcttcattgccccacccaaagaacctccacgttgttggaatgacgcaatacaaggccgaattccctttcccagcgcttttcccaccgctctcgaataagaacgtgttggctgagtggctggcaagtcagggtctgacgcagttccactgtgccgaaaccgaaaagtatgcacacgtgacgttcttcttcaatggtggggttgagaaacaatttgaaaatgaagagcgatgcatggtaccaagtccgaaggtggccacctatgatctactaccagagatgtcttccgctggagtagctgataaaatggtcgaacagatcaagtctaagaaacatccatttgtaatgtgcaacttcgctcctcccgatatggtcggccatactggggtttacgaagcagcagtcaaagcttgtgaggccacagataaagcaattggaagaattttcgaagcttgcaaagaaaatggttatgtactgatggtgacggccgatcatggcaatgctgagaagatgaaggctcctgatggcagcaagcatactgctcacacttgtaatcgtgtacccttcacttgcagcagtaaagacttcaacttaccgaccgcgctcctgctctctgcgatgtggcaccgaccgttcttgctgtaa

SEQ ID NO: 319 - DNA, 1734 bp, Ancylostoma ceylanicum
atggttgggagcgactatcacaggcacgattgctcaactatcgtcgtttttgagacggaccataggacaaaatttatgctctggcgccctcaaactgcactactatttctgcgccaagcatgtagagcccagcacttctctgcacagtaccaagttcgccgccaatggggcggcatggcaaaagtggcgaaccgcgtttgtttgatcgtcattgacggttggggtctttctgacgaatccaacggtaacgcgatcaaaaatgcgaatacgcccgtcatggatggactgtgctctggcaactggacacagattgaagcgcatggtcttcatgtcggccttcccgaaggacttatgggtaactccgaggtcggtcatcttaacattggttccggtcgtccaatctatcaggacattgtgcgtatcaatctctccatcaaggataacactcttgtcaaaaacgaggctctagtggcatcctgcaatcgcgccaagtccggaaatggacgtcttcacctggccggactggtttctgatggaggtgttcactcacacattgatcacttgttcgcgctcataaaagctatcaagcaactaggagttcctgaattgtatcttcatttctatggggacggtcgtgacacctcacccactagtggtgttggatttctggagaagacaatcgcgtttataaaggagcagaactactgtcagctagctacgattgttggccgctactacgccatggatcgtgacaaacgttgggagagaatctgtgttgcatatgaagctatgattggcggcaaaggcgaagcaactaccgttgaagaggcaccagcggtggttaagaaacgctatgcagcgcaggaaactgacgaattcctcaagcctattattattaacggagataaagctcgagtgaaggatggtgatactctcattttcttcgattacagagctgacagaatgagagaaatttctgaggtcatgggaatggaaagatacaaagactgcaaatcttcattgccccacccaaagaacctccacgttgttggaatgacgcaatacaaggccgaattccctttcccagcgcttttcccaccgctctcgaataagaacgtgttggctgagtggctggcaagtcagggtctgacgcagttccactgtgccgaaaccgaaaagtatgcacacgtgacgttcttcttcaatggtggggttgagaaacaatttgaaaatgaagagcgatgcatggtaccaagtccgaaggtggccacctatgatctactaccagagatgtcttccgctggagtagctgataaaatggtcgaacagatcaagtctaagaaacatccatttgtaatgtgcaacttcgctcctcccgatatggtcggccatactggggtttacgaagcagcagtcaaagcttgtgaggccacagataaagcaattggaagaattttcgaagcttgcaaagaaaatggttatgtactgatggtgacggccgatcatggcaatgctgagaagatgaaggctcctgatggcagcaagcatactgctcacacttgtaatcgtgtacccttcacttgcagcagtaaagacttcaagttcaagaaggcaaggattttatgtcttcaagagacgaaatcgattttcagaactaatttttttgttttttttttcagcttaccgaccgcgctcctgctctctgcgatgtggcaccgaccgttcttgctgtaa

SEQ ID NO: 320 - DNA, 1656 bp, Ancylostoma ceylanicum
atggttgggagcgactatcacaggcacgattgctcaactatcgtcgtttttgagacggaccataggacaaaatttatgctctggcgccctcaaactgcactactatttctgcgccaagcatgtagagcccagcacttctctgcacagtaccaagttcgccgccaatggggcggcatggcaaaagtggcgaaccgcgtttgtttgatcgtcattgacggttggggtctttctgacgaatccaacggtaacgcgatcaaaaatgcgaatacgcccgtcatggatggactgtgctctggcaactggacacagattgaagcgcatggtcttcatgtcggccttcccgaaggacttatgggtaactccgaggtcggtcatcttaacattggttccggtcgtccaatctatcaggacattgtgcgtatcaatctctccatcaaggataacactcttgtcaaaaacgaggctctagtggcatcctgcaatcgcgccaagtccggaaatggacgtcttcacctggccggactggtttctgatggaggtgttcactcacacattgatcacttgttcgcgctcataaaagctatcaagcaactaggagttcctgaattgtatcttcatttctatggggacggtcgtgacacctcacccactagtggtgttggatttctggagaagacaatcgcgtttataaaggagcagaactactgtcagctagctacgattgttggccgctactacgccatggatcgtgacaaacgttgggagagaatctgtgttgcatatgaagctatgattggcggcaaaggcgaagcaactaccgttgaagaggcaccagcggtggttaagaaacgctatgcagcgcaggaaactgacgaattcctcaagcctattattattaacggagataaagctcgagtgaaggatggtgatactctcattttcttcgattacagagctgacagaatgagagaaatttctgaggtcatgggaatggaaagatacaaagactgcaaatcttcattgccccacccaaagaacctccacgttgttggaatgacgcaatacaaggccgaattccctttcccagcgcttttcccaccgctctcgaataagaacgtgttggctgagtggctggcaagtcagggtctgacgcagttccactgtgccgaaaccgaaaagtatgcacacgtgacgttcttcttcaatggtggggttgagaaacaatttgaaaatgaagagcgatgcatggtaccaagtccgaaggtggccacctatgatctactaccagagatgtcttccgctggagtagctgataaaatggtcgaacagatcaagtctaagaaacatccatttgtaatgtgcaacttcgctcctcccgatatggtcggccatactggggtttacgaagcagcagtcaaagcttgtgaggccacagataaagcaattggaagaattttcgaagcttgcaaagaaaatggttatgtactgatggtgacggccgatcatggcaatgctgagaagatgaaggctcctgatggcagcaagcatactgctcacacttgtaatcgtgtacccttcacttgcagcagtaaagacttcaacttaccgaccgcgctcctgctctctgcgatgtggcaccgaccgttcttgctgtaa

SEQ ID NO: 321 - DNA, 2211 bp, Ancylostoma ceylanicum
atgtgtggcatcttcgcttaccttaactttctaacccctaaaactcgcagcgaaatcatcgatgtgttgatcaaaggtctacaaaggatggagtacagaggatatgactcagcaggtattgctatcgatggcggaaacgagcctgactcccctcacggcgaagtgctcctgctcaggaaagctggtaaagtctcggtacttgaggaggctatcaaagaatccggcgagacactaaatatggacatgcaatacaacatccactgtggaatcgctcacacacgatgggccacccatggttcccctaaggacgtcaacagccacccgcagaggagcaacgagaagaacgaattcatggttgtccacaacggcatcatcactaactaccgtgagatcaaggagtatctgaagaagaagggacacaagttcgagtcggagacggacactgaagtgatcgcaaagctcatccaacacatccacgatcgctatccagacttctcgtttagacagctggtggagattgtaatccaacaattggaaggcgcattcgcgctggcgttcaaatcgtccaaattccctggccagcttgtggctactcgccgtggatctcctctgctgattggcatcaagagtaacaacagcctgcagactaaccatttccccgtttcgtatagtaaagcccgtcgattcgcctccactcaagcaactcatttgcgccgaccttccactgaggaatcattcgctgagactccgaatgcgcttgatctttcttctggcatccgatctgctcatctccttgaccgcagcagaggtcctgcaaatgtccgtccattcgattctgaagactttgaggtggaatatttcgtcgcttccgatgccgcagccatcgttgaacacactaagcaggtgttgttcctcgaggacgacgatgtcgcattcgtcgaggatggagctctatcgatccaccgtataactcgcaaattttcctcggaaaatccccagcagacaagagaggtgcagaatttgaacctggaactgcagcagatcatgaagggcaacttcaaaacgtttatgcagaaggaaatcttcgagcaaccggagtctgtggtgaacacaatgcgtggtcgtgtgctaccgagtggtcaagttgttctgggaggaattaaggactacatagcagatattaagagatgtagacgactaatcatgatcgcctgtggcacttcgtaccattcagccattgcttgccgtcagatcctggaagagctctccgagcttcctgtcgtgttagagttggcgtcagatttcttggatcgcaagacaccgatcttccgcgatgacgtgtgcatattcatttcgcaaagtggtgaaacagccgatacactcatggcattgaggtattgcaaaccccgcggagcccttctaattggcatcacaaacaccgttggctcgtccatttgccgtgaatcccactgtggagttcacattaatgctggaccagaaatcggagtggcatccaccaaggcctacacttcgcaaatcctgtccttgctgatgttcgctctggttctatctgatgaccgcatttcgatgataaacagaaggcgagagatcatcaacgctctcaaccaactgccgaatctaatccgagaagtcttggaattagacaaagatgcattgagaatcgctcaagagatctataacgagaagtctctgctgatcatgggaagaggctacaactttgccacctgccttgagggtgcactgaagatcaaggaactgtcgtacctgcactgtgaaggcattatgtccggagaactgaaacatggtcctttggcgatggtagacgagaatctgcgcatttgcatggtcatctgtaatgattccgtttataaggcgagcatgtcttcaattcacacagagagtgcatttcgaattaagttgaagatgctgggatttttccagaaatccttgaacgctctgcaacaagttgtcgctcgaggcggagctccgtttatcattgctgatcacacggttcctgaaaaggatttggccggtatgaagcatgtcctgagaataccaaaaacagtggactgtgttcagaacatactgacggtcattcctcttcagctgatggcctatcacatcgctgagctcaacggacaaaatgtagatcgtccgcgaaacttggcgaagtcggtgacggtcgaatga

SEQ ID NO: 322 - DNA, 1485 bp, Ancylostoma ceylanicum
atggctggcaacgaagatgtctcggctcactacctcgctcctggtggatcggcgaaagtcgccagtcagagcagtcaaggattacaggatgatggcgtctggatcatcaccgccagtttcactatcttcacaatgacatcaggcttcggactactcgagtcaggacgggtttcatccaaggatgaaatcaacatcatggtcaaaaacgtcgttgacgttatttttggcgggttatcatactggatgttcggcttcggtttcacttttggccacagtgtgaactacgggaatgcatttattggactcggtgacttcttcttcgatccagtttctcacgacgaaaatacggaaggttggacttatgcctcattcatttatcagatgagttttgccacaacaacatcggctatagtctcagcaggtatggccgaacgtgtccgcttgaaagcgtacatcatcatctcgttcgtcatgacgctcatccactccatcccagctcactgggtctggagcgacaacgggatactattcaagtttggagtgatagactcggccggatgcagcgtcgtgcatctggttggcggcatttctgggatgattgccaccatatacctgaggccgaggcaaaaacgtttcggaaaaatgggcaagaagcggatgagcaaccctacgaacgctatcctgggaacattcatgctgtggtggggctggcttgccttcaacactggttccacatacggtgtcacccatggaaaatggtaccttgcagctaggtcagccgttggtacaataatggcgtcagtaggaggtggtatcacatcacttttgatttcaagatttgtcactagaagaatagaagtcgacatgattattgatggaatgctggcttcgctagtttctagctcagcttgctgtggttgtttcactccatggcaggcatttgtagtaggatcattcggagcgggattcgctttgttgtcctatccgctcctggagtgggcagaggtagacgatccagtcggcgtgatacctgtacatgtgattggatctatatggggtatgatgagtgcgggtatatttgcaagggatgacccttcaaattggaagctaacacgacggcaaaatggtcttctgtttggaggtggcctcacgctcatatgcaaacagcttttagccgtagttgttgtatctctatggtcagcgctgataggctttattaccctattttgccttcaacattctcgggttggtctccgtctcacaaggcttgaagaagaaatcggagctgatctgagggagcatggactgagtgggcattgtgtgcgagcctatgaatttgaaaagaagctcacaccagagacagcagctaagatgatgctgatgatggtacgatggaaagtaaaggcaaggaagggcgctcagcgaaggagggatcgtgaaaatgttgcactacacactatgaacagcacaggtcgcaggatgtga

SEQ ID NO: 323 - DNA, 1167 bp, Ancylostoma ceylanicum
atggagttggggtgggggcatctagcaaaagtcgataacttggcatgtcctacacgttctgacttgctaattgacattgagacgctagtcgcaatctcgtttctcgatccggatcgtcgccccgcctatcgcattgcactttgtctagccgtcgccgcctacaaacgagtatatccactagtgctgccaacaatgaggttgctaatattcacctactgcctttccactgccgttttgtcccaaaagtacggaccgcccgggccactctcgtcgcacttcgtcgactggctgattgcacatggctacgagaacgacaatttcgaccggcctgacgtgggaccaaatggaagttttggtggcaaaaaacgggcaacagagcagataagaaacgaaccggtcatctttattcatgggaatggtgacgctgctctacacgcacaagcaccactggccaccggatggagcagatcaatccaatactttatggagcagaattacaccgagggagagttgtacgccactacatggggtgatgcatggggtacaggatcaatcctcgacagttacagcacaatgcacacgtgcagtaatctacttttcctacgcaggttcatagaggcggttatagcatacacgggtgcacgaaaagttgatgtcatcgctcattccgttggtgtcgtcctcgccaggaaggcgctgaaaggtggatcactaataggaaccgatggtaactgcacccttggacctccactcaccaataaaatcgacacatttgttggtatcgcgggacccaactatggcctatgtgtttgtcagctagctcaaactgttcctgcatggtgcaatgctctggatggattgtatccaggatacacttgtcaggaccagctcctctgtggctacacctccggtaactgcaaacaagaaaactattccgccctgctcgagaagctcaacaacgaccctgcccgagaggctgagcacgtctacgcgatgtggagcgatgttgacgaagtgctgctgttccgtggtatgacgtggggtaaaccgacgtctcgaattcctggcatgaacggacgatgggtgtccgatcgaaacggccacgtcgccatgaaagacctcacagagctgcgacagttcgaagctgtcgtgcatcactcgatctaa

SEQ ID NO: 324 - DNA, 1260 bp, Ancylostoma ceylanicum
atgaccgcacttatgatctcaatagcaattgctatacttgtgactattttgtacgctatatattatgcactgcgaccgtgcaatcgaatcaagaagctcggtgatcttgggctgttccttggtgatcctcagttgaaaggtgtatatcgtgagcgacaaatcacacgactggcaaagctacgacggataggtgaattgccgcctgtatatccaaatggctggtattgtattgctgaatctgatgagataaaaccgaagtgtataaaggaggtcacaatatttgggcaatttcttaccctggtcagatctgaaactggacaggtacacctgatcgattcctattgtcctcacataggagcgaatttcaacgtgggcggaaaagtggtagacaataactgcgtccagtgccctttccacggctgggtgttttctgccgaaacgggaaaatgcacacgaataccgtatgataacggtacgataccagaacaggcaaaggtcgccgtttggccggtcctggaaaggaatcagcatatctatgtctggtatcactgtgatggccacgaccctgagtgggatatccctgaatttgacgagatcacaaatggtgagtggacgtatggaggccgtactgagcacgagatcatgtgccattgccaggagatcccggagaatggcgccgacattgcgcacctgaactacttgcacctttctggacccaataaaggaaacaatctgtttaatattgatcttgacaacacaaatccactagtgcgtcacacatgggatgggaaatgggctccacaaacgggggagaatgctcacgtctccgtgatgcacctggatcagtacatgactattgctggattcaggatcccattgacggatagtcatcttagagctgaacagcatggccccggcatcgtacacatgctgttcgacttcggtatccttggtcgaggtgttgttctccagcatgtgacgcctcaagaacctcttcaacagttggtgcgattcaaattgtactccaccgtgccacgatggttcgccaaattctttctgatcagtgaagcgaatcagtttgaacgagatatctgggtttggtcaaacaagaaatacatcaaaagtcccatccttgtacggaacgacggaccgattcagaagcaccgaaggtggtattcacaattctacaaagagaacagcccacgattgctgcccaatggagagttatcgaatcggccgaaatctgtttacgattggtag

SEQ ID NO: 325 - DNA, 318 bp, Ancylostoma ceylanicum
atgagtgtgaaacagttggaatctgatactggatgtcatatcttaattagaggaaaggggagtgtcaaggatcctagaaaagagcaacgcctccgtggacagccagggtgggatcaccttgaagagccattgcatgtgcttgtcacagccgtagatcataacagcatagcatgtcaacagaaacttcgtcagggcgttgaaagtgtgcgcaatcttctgacacctgctcatgacgactataaacgttgccaattgatgcagcttgcgatcatcaatggaacgtatcgccaagcgcaggaaacatcgtccagcgaataa

SEQ ID NO: 326 - DNA, 414 bp, Ancylostoma ceylanicum
atgctcctaatggaagaaatccttcgtgtatatagaatggtgaatccgtcatgtacagccactcctatttccgcttcatcgtctccacaaaaggaccttaaagatatagtaccagcggtggatgctcaagagttgtcccagtccttgattgaaaacatgaacagagcgtttaactgcattacaaacaccaaacatccgacaagcaatcaaacgaacacatatgaagatccgcatcaacaagccgttacaatgagcgagaaagtattcattccaaaattacatgggcgccgaatcaaagggtatgaactgttgaaatctgaatttaaatggaatagcattggttgggacagtgaagaaccgcaacatcgaactctgttgcgcaccctttggcatggacaagagcgtaatgtctag

SEQ ID NO: 327 - DNA, 405 bp, Ancylostoma ceylanicum
atggaagaaatccttcgtgtatatagaatggtgaatccgtcatgtacagccactcctatttccgcttcatcgtctccacaaaaggaccttaaagatatagtaccagcggtggatgctcaagagttgtcccagtccttgattgaaaacatgaacagagcgtttaactgcattacaaacaccaaacatccgacaagcaatcaaacgaacacatatgaagatccgcatcaacaagccgttacaatgagcgagaaagtattcattccaaaattacatgggcgccgaatcaaagggtatgaactgttgaaatctgaatttaaatggaatagcattggttgggacagtgaagaaccgcaacatcgaactctgttgcgcaccctttggcatggacaagagcgtaatgtctag

SEQ ID NO: 328 - DNA, 660 bp, Ancylostoma ceylanicum
atgctcctaatggaagaaatccttcgtgtatatagaatggtgaatccgtcatgtacagccactcctatttccgcttcatcgtctccacaaaaggaccttaaagatatagtaccagcggtggatgctcaagagttgtcccagtccttgattgaaaacatgaacagagcgtttaactgcattacaaacaccaaacatccgacaagcaatcaaacgaacacatatgaagatccgcatcaacaagccgttacaatgagcgagaaagtattcattccaaaattacatgggcgccgaatcaaaggttccaagtgcaactttattgggcgaattattggacctgcagggatgagtgtgaaacagttggaatctgatactggatgtcatatcttaattagaggaaaggggagtgtcaaggatcctagaaaagagcaacgcctccgtggacagccagggtgggatcaccttgaagagccattgcatgtgcttgtcacagccgtagatcataacagcatagcatgtcaacagaaacttcgtcagggcgttgaaagtgtgcgcaatcttctgacacctgctcatgacgactataaacgttgccaattgatgcagcttgcgatcatcaatggaacgtatcgccaagcgcaggaaacatcgtccagcgaataa

SEQ ID NO: 329 - DNA, 651 bp, Ancylostoma ceylanicum
atggaagaaatccttcgtgtatatagaatggtgaatccgtcatgtacagccactcctatttccgcttcatcgtctccacaaaaggaccttaaagatatagtaccagcggtggatgctcaagagttgtcccagtccttgattgaaaacatgaacagagcgtttaactgcattacaaacaccaaacatccgacaagcaatcaaacgaacacatatgaagatccgcatcaacaagccgttacaatgagcgagaaagtattcattccaaaattacatgggcgccgaatcaaaggttccaagtgcaactttattgggcgaattattggacctgcagggatgagtgtgaaacagttggaatctgatactggatgtcatatcttaattagaggaaaggggagtgtcaaggatcctagaaaagagcaacgcctccgtggacagccagggtgggatcaccttgaagagccattgcatgtgcttgtcacagccgtagatcataacagcatagcatgtcaacagaaacttcgtcagggcgttgaaagtgtgcgcaatcttctgacacctgctcatgacgactataaacgttgccaattgatgcagcttgcgatcatcaatggaacgtatcgccaagcgcaggaaacatcgtccagcgaataa

SEQ ID NO: 330 - DNA, 3498 bp, Ancylostoma ceylanicum
atgctcttggtggatacctacgagaagaagatcgaacaagatgaggatttgaaacggcgcatcgcacagtcgaggccacacaagaagctaacgtcaaaaagagtttatttggaccttcttcgtaaagatgacgtgctctcacacggagctgtaaccaatgagtttctgataaaatgtcatctggaagcacttggaatcgagagctcgaaaaagaaggacatccatctggattctgaccgacgtctgccgctgtacgcctacacccatgatacgttcagcctgctgctggtgccaatgataaaggaaaagaaggaagcgctgggatctatgggaaacgacgctgctctggcgtgtctctccgacttcagtcctctgctgttctcctactgccagcagctcttcgctcaggtaacgaatccacccatcgatccattccgtgaacaaatcgtgatgagtctgagatgtccagttggtccagaatccaacctactggaaccaaatgaagagctggacagccgtctaatccttgagcagcctgtgctttcgctagtggatatcgaggtgatcaaacgcacaatgtacaaaggctggcgcagcaaaaccatagacacaactttccctgtgaggtatggagtaaaaggactcgtgccaggactggaccgaatctgctgtgaagcatgcacagctgctctggatggataccagattcttgtgctgtctgatcgagctgcaagcaaagacaatgtgccaatatcctcacttttggcggtcggggccattcaccagtgccttatccgacataggttgagaatgaaggtcgctattattgtggaatctggagaagccaaggtcgtccatgatttctgtgtattgctcggattcggcgccgatgccatctgcccgtacatggtgttcgaaacaatgtatcgtcttcgccatcttggtctgctcgacaaggagttgaatgacgatatggtgttccaaggatatcgacaaggtgtggagcgaggtatcttcaaggtaatggctaaaatgggcatcagcacattgcattcgtacaagcatgcacagattttcgaaattgtcggattagcgaaggaagttgtggacatgtgcttcaagaacaccgtgtcgcgcctcggtggcgccaccttcgagattctggcggcagaggcgctgaagcgccaccgagctgcgttcccggccgccgctaacgccgacaagcacgtattcggggattcacgtgtgttggtcgcatcagggacatatcactggagagctggtggtgagaagcatatcaatgagccagaagcaatcgccaagttgcaggcagccacccgtacgaacaacgcaaaaaccttccatgagtattctcgcatatcaaatctccagcagagatggtgcaccctcagaggccaacttgaaattaagaccagcaacaagcttgaaatccccatggatcaggtggaacctgcgagtgagatcgtgaagcgatttgttactggagcgatgtctttcggatcaatttcgtgggaggcccacacaactcttgcgattgcgatgaatcgcataggagcgaagtccaacacaggagaaggtggtgaaaagccggagcgatacgcgagtaaccaagatgcgaacaataacctgcgttcagccatcaagcaggttgcttctgctagatttggtgttacctcctcctatctggccaatgctgatgaactgcaaatcaaaatggctcaaggtgccaagccgggagaaggtggtgaacttcccggtcataaggtaaccaaggacatcgccgacactagaaagtcaacggcgggagtagggctgatctcgccaccgccacaccacgatatctactcgatcgaggatctcgctcaactgatctacgatctgaaatgcgccaatcccgaagcgagggtgagcgtgaagctcgtctccgaggcaggtgtgggcatcattgcgtcgggagttgtgaaaggaaatgcggatcatgttaccatctccggtcatgatggtggcacaggagcttccagctggactggcatcaaacacgctggtctgccttgggaacttggtgtggccgaaactcaccaggtactcactatgaacaacctcaggagtcgggtgattctacaagctgatggccaaatcaggaccggtcgtgatgttatgattgctgcactgctgggagcagatgagttcggtatgtccaccgcacctctcatcgttctcggatgtacaatgatgagaaaatgccatctaaatacttgcccagtcggaattgccactcaggatcctgttcttcgtgctaaatttgagggaaagccagaacatgtagtaaacttcatgttcatggttgccgaagaagtccgttatttccttgcgagattaggtctccgaaccctcagcgaggctattggacgcacagatctgctgtacgctaatcctaatcctgtcaacaagaaggcaacgatgcttgaattcggttccattctcaagaatgttcatcacatgttcccgaacgtgtctaccaagggaggaacagtcaagcagactattgaacttggtgaactggagcaggagatcctgaaacgtctcgataaagtgttcagtaattctggagagcatcttgtgatctccaggaaaaccatcactaatctggatcgtgcgtttggcacaagaatcagctacgaaatctccaagcgcttcggtgaagaaggactcaacggtacaagatcgattaaaatcctcttggatggctcagccggtcaatcgttctgtgcattcctcgctaaaggtgtcacggtcgagttggaaggggatgcaaatgactatgttgggaagtgcctatctggaggtactgtgattgtatatcctccgaaaaaggcggcttacaaatcggaggagaactcaatcatcggaaacgtcgctctctacggtgcaacgtctggtgactgctggttccgtggtgtagccggagagcgcttcgctgtcagaaactcgggttgcatcgctgtggtcgaagcggtcggtgaccatgcatgtgaatacatgactggtggaagagtaattgtgctgggacccataggaagaaacttcgctgccgctatgagcggtggaatcgcgttcctctttaaccagggcgatccgttcactcaccgaatcaacgttgccaccgtcgatctggatccacccagcgaagatgacctcgtgtttattcgtgacaggataaaaaaatttgtcgaactcacaggatccgagctaggccaacacatccttgacaattggcagactgaacatgcaaaaattatcaaggtattcccacgtgactacaaaagagtgcttctggagcaggaagaagagaggaaacgaatcgctgagcagaaagctgctaaggagaaggtttgttctaatgtacataaatgtgtggacccgcacggctatttttcaagcttagtctcgccttccttctgtacgcaatgggtgtaa

SEQ ID NO: 331 - DNA, 3573 bp, Ancylostoma ceylanicum
atgattctggacaattttgtggtgggaagctgtaaattcgagcttgatggcgaagatcgtctgaaacctggaagaatgctcttggtggatacctacgagaagaagatcgaacaagatgaggatttgaaacggcgcatcgcacagtcgaggccacacaagaagctaacgtcaaaaagagtttatttggaccttcttcgtaaagatgacgtgctctcacacggagctgtaaccaatgagtttctgataaaatgtcatctggaagcacttggaatcgagagctcgaaaaagaaggacatccatctggattctgaccgacgtctgccgctgtacgcctacacccatgatacgttcagcctgctgctggtgccaatgataaaggaaaagaaggaagcgctgggatctatgggaaacgacgctgctctggcgtgtctctccgacttcagtcctctgctgttctcctactgccagcagctcttcgctcaggtaacgaatccacccatcgatccattccgtgaacaaatcgtgatgagtctgagatgtccagttggtccagaatccaacctactggaaccaaatgaagagctggacagccgtctaatccttgagcagcctgtgctttcgctagtggatatcgaggtgatcaaacgcacaatgtacaaaggctggcgcagcaaaaccatagacacaactttccctgtgaggtatggagtaaaaggactcgtgccaggactggaccgaatctgctgtgaagcatgcacagctgctctggatggataccagattcttgtgctgtctgatcgagctgcaagcaaagacaatgtgccaatatcctcacttttggcggtcggggccattcaccagtgccttatccgacataggttgagaatgaaggtcgctattattgtggaatctggagaagccaaggtcgtccatgatttctgtgtattgctcggattcggcgccgatgccatctgcccgtacatggtgttcgaaacaatgtatcgtcttcgccatcttggtctgctcgacaaggagttgaatgacgatatggtgttccaaggatatcgacaaggtgtggagcgaggtatcttcaaggtaatggctaaaatgggcatcagcacattgcattcgtacaagcatgcacagattttcgaaattgtcggattagcgaaggaagttgtggacatgtgcttcaagaacaccgtgtcgcgcctcggtggcgccaccttcgagattctggcggcagaggcgctgaagcgccaccgagctgcgttcccggccgccgctaacgccgacaagcacgtattcggggattcacgtgtgttggtcgcatcagggacatatcactggagagctggtggtgagaagcatatcaatgagccagaagcaatcgccaagttgcaggcagccacccgtacgaacaacgcaaaaaccttccatgagtattctcgcatatcaaatctccagcagagatggtgcaccctcagaggccaacttgaaattaagaccagcaacaagcttgaaatccccatggatcaggtggaacctgcgagtgagatcgtgaagcgatttgttactggagcgatgtctttcggatcaatttcgtgggaggcccacacaactcttgcgattgcgatgaatcgcataggagcgaagtccaacacaggagaaggtggtgaaaagccggagcgatacgcgagtaaccaagatgcgaacaataacctgcgttcagccatcaagcaggttgcttctgctagatttggtgttacctcctcctatctggccaatgctgatgaactgcaaatcaaaatggctcaaggtgccaagccgggagaaggtggtgaacttcccggtcataaggtaaccaaggacatcgccgacactagaaagtcaacggcgggagtagggctgatctcgccaccgccacaccacgatatctactcgatcgaggatctcgctcaactgatctacgatctgaaatgcgccaatcccgaagcgagggtgagcgtgaagctcgtctccgaggcaggtgtgggcatcattgcgtcgggagttgtgaaaggaaatgcggatcatgttaccatctccggtcatgatggtggcacaggagcttccagctggactggcatcaaacacgctggtctgccttgggaacttggtgtggccgaaactcaccaggtactcactatgaacaacctcaggagtcgggtgattctacaagctgatggccaaatcaggaccggtcgtgatgttatgattgctgcactgctgggagcagatgagttcggtatgtccaccgcacctctcatcgttctcggatgtacaatgatgagaaaatgccatctaaatacttgcccagtcggaattgccactcaggatcctgttcttcgtgctaaatttgagggaaagccagaacatgtagtaaacttcatgttcatggttgccgaagaagtccgttatttccttgcgagattaggtctccgaaccctcagcgaggctattggacgcacagatctgctgtacgctaatcctaatcctgtcaacaagaaggcaacgatgcttgaattcggttccattctcaagaatgttcatcacatgttcccgaacgtgtctaccaagggaggaacagtcaagcagactattgaacttggtgaactggagcaggagatcctgaaacgtctcgataaagtgttcagtaattctggagagcatcttgtgatctccaggaaaaccatcactaatctggatcgtgcgtttggcacaagaatcagctacgaaatctccaagcgcttcggtgaagaaggactcaacggtacaagatcgattaaaatcctcttggatggctcagccggtcaatcgttctgtgcattcctcgctaaaggtgtcacggtcgagttggaaggggatgcaaatgactatgttgggaagtgcctatctggaggtactgtgattgtatatcctccgaaaaaggcggcttacaaatcggaggagaactcaatcatcggaaacgtcgctctctacggtgcaacgtctggtgactgctggttccgtggtgtagccggagagcgcttcgctgtcagaaactcgggttgcatcgctgtggtcgaagcggtcggtgaccatgcatgtgaatacatgactggtggaagagtaattgtgctgggacccataggaagaaacttcgctgccgctatgagcggtggaatcgcgttcctctttaaccagggcgatccgttcactcaccgaatcaacgttgccaccgtcgatctggatccacccagcgaagatgacctcgtgtttattcgtgacaggataaaaaaatttgtcgaactcacaggatccgagctaggccaacacatccttgacaattggcagactgaacatgcaaaaattatcaaggtattcccacgtgactacaaaagagtgcttctggagcaggaagaagagaggaaacgaatcgctgagcagaaagctgctaaggagaaggtttgttctaatgtacataaatgtgtggacccgcacggctatttttcaagcttagtctcgccttccttctgtacgcaatgggtgtaa

SEQ ID NO: 332 - DNA, 4401 bp, Ancylostoma ceylanicum
atgctcttggtggatacctacgagaagaagatcgaacaagatgaggatttgaaacggcgcatcgcacagtcgaggccacacaagaagctaacgtcaaaaagagtttatttggaccttcttcgtaaagatgacgtgctctcacacggagctgtaaccaatgagtttctgataaaatgtcatctggaagcacttggaatcgagagctcgaaaaagaaggacatccatctggattctgaccgacgtctgccgctgtacgcctacacccatgatacgttcagcctgctgctggtgccaatgataaaggaaaagaaggaagcgctgggatctatgggaaacgacgctgctctggcgtgtctctccgacttcagtcctctgctgttctcctactgccagcagctcttcgctcaggtaacgaatccacccatcgatccattccgtgaacaaatcgtgatgagtctgagatgtccagttggtccagaatccaacctactggaaccaaatgaagagctggacagccgtctaatccttgagcagcctgtgctttcgctagtggatatcgaggtgatcaaacgcacaatgtacaaaggctggcgcagcaaaaccatagacacaactttccctgtgaggtatggagtaaaaggactcgtgccaggactggaccgaatctgctgtgaagcatgcacagctgctctggatggataccagattcttgtgctgtctgatcgagctgcaagcaaagacaatgtgccaatatcctcacttttggcggtcggggccattcaccagtgccttatccgacataggttgagaatgaaggtcgctattattgtggaatctggagaagccaaggtcgtccatgatttctgtgtattgctcggattcggcgccgatgccatctgcccgtacatggtgttcgaaacaatgtatcgtcttcgccatcttggtctgctcgacaaggagttgaatgacgatatggtgttccaaggatatcgacaaggtgtggagcgaggtatcttcaaggtaatggctaaaatgggcatcagcacattgcattcgtacaagcatgcacagattttcgaaattgtcggattagcgaaggaagttgtggacatgtgcttcaagaacaccgtgtcgcgcctcggtggcgccaccttcgagattctggcggcagaggcgctgaagcgccaccgagctgcgttcccggccgccgctaacgccgacaagcacgtattcggggattcacgtgtgttggtcgcatcagggacatatcactggagagctggtggtgagaagcatatcaatgagccagaagcaatcgccaagttgcaggcagccacccgtacgaacaacgcaaaaaccttccatgagtattctcgcatatcaaatctccagcagagatggtgcaccctcagaggccaacttgaaattaagaccagcaacaagcttgaaatccccatggatcaggtggaacctgcgagtgagatcgtgaagcgatttgttactggagcgatgtctttcggatcaatttcgtgggaggcccacacaactcttgcgattgcgatgaatcgcataggagcgaagtccaacacaggagaaggtggtgaaaagccggagcgatacgcgagtaaccaagatgcgaacaataacctgcgttcagccatcaagcaggttgcttctgctagatttggtgttacctcctcctatctggccaatgctgatgaactgcaaatcaaaatggctcaaggtgccaagccgggagaaggtggtgaacttcccggtcataaggtaaccaaggacatcgccgacactagaaagtcaacggcgggagtagggctgatctcgccaccgccacaccacgatatctactcgatcgaggatctcgctcaactgatctacgatctgaaatgcgccaatcccgaagcgagggtgagcgtgaagctcgtctccgaggcaggtgtgggcatcattgcgtcgggagttgtgaaaggaaatgcggatcatgttaccatctccggtcatgatggtggcacaggagcttccagctggactggcatcaaacacgctggtctgccttgggaacttggtgtggccgaaactcaccaggtactcactatgaacaacctcaggagtcgggtgattctacaagctgatggccaaatcaggaccggtcgtgatgttatgattgctgcactgctgggagcagatgagttcggtatgtccaccgcacctctcatcgttctcggatgtacaatgatgagaaaatgccatctaaatacttgcccagtcggaattgccactcaggatcctgttcttcgtgctaaatttgagggaaagccagaacatgtagtaaacttcatgttcatggttgccgaagaagtccgttatttccttgcgagattaggtctccgaaccctcagcgaggctattggacgcacagatctgctgtacgctaatcctaatcctgtcaacaagaaggcaacgatgcttgaattcggttccattctcaagaatgttcatcacatgttcccgaacgtgtctaccaagggaggaacagtcaagcagactattgaacttggtgaactggagcaggagatcctgaaacgtctcgataaagtgttcagtaattctggagagcatcttgtgatctccaggaaaaccatcactaatctggatcgtgcgtttggcacaagaatcagctacgaaatctccaagcgcttcggtgaagaaggactcaacggtacaagatcgattaaaatcctcttggatggctcagccggtcaatcgttctgtgcattcctcgctaaaggtgtcacggtcgagttggaaggggatgcaaatgactatgttgggaagtgcctatctggaggtactgtgattgtatatcctccgaaaaaggcggcttacaaatcggaggagaactcaatcatcggaaacgtcgctctctacggtgcaacgtctggtgactgctggttccgtggtgtagccggagagcgcttcgctgtcagaaactcgggttgcatcgctgtggtcgaagcggtcggtgaccatgcatgtgaatacatgactggtggaagagtaattgtgctgggacccataggaagaaacttcgctgccgctatgagcggtggaatcgcgttcctctttaaccagggcgatccgttcactcaccgaatcaacgttgccaccgtcgatctggatccacccagcgaagatgacctcgtgtttattcgtgacaggataaaaaaatttgtcgaactcacaggatccgagctaggccaacacatccttgacaattggcagactgaacatgcaaaaattatcaaggtattcccacgtgactacaaaagagtgcttctggagcaggaagaagagaggaaacgaatcgctgagcagaaagctgctaaggagaaggtttgttctaatgtacataaatgtgtggacccgcacggctatttttcaagcttagtctcgccttccttctattacgaatccaaacattggcgcaattctagacaactattatttaacaaattattagctcttttggaggcggatgaagaagatgacatggaaggaccaggacgtcctcgtcaacgcaccctttccatggatatgcagattgctccaacactcattcacaagaagaagcttcttacaaagagaaagctcagcgtagcacagcgcaaacgaagatcttcgaaaaatcctcgaccacaggatgtcgcaggattcgaggatgaggaggatttgcaggatgctatcgaggataatgaagaagatgagactaagtcagacaatgatgaggaactgctgtctgatgatgaaatgttccactcgaacgatttcctgcgtcatatcaacagagaccttgacattgagaatatcgtggtgcctcctcatttgaagaagaatgacgaacctctcgataagctccgtggatttgtcaagtacaaccgccagaaaaagatttaccgttctcccgaggagcgtctgaaagattgggatgaggtgtacgacttcgagtctgttcgcagcaacattcgtgaacaagctgcaaggtgcatggattgtggtgtgccattctgtcaaggaaatactggctgtcccctcggcaacattatccctaaatggaacgactacgtcttcaagaagaactggcgtcaagctcttgagcagctgttgcagaccaacaacttccccgaattcactggaagagtgtgtccagcgccgtgtgagggtgcttgctgcttagcaatcagctcacctgccgttactatcaagtccattgaatgtgcgattattgattacgcgttcatgcaagggtggatcaaggcccaccccccggtggagaacactggaaagcgcattgcgatcgtaggatctgggccagctggtatctga

SEQ ID NO: 333 - DNA, 4476 bp, Ancylostoma ceylanicum
atgattctggacaattttgtggtgggaagctgtaaattcgagcttgatggcgaagatcgtctgaaacctggaagaatgctcttggtggatacctacgagaagaagatcgaacaagatgaggatttgaaacggcgcatcgcacagtcgaggccacacaagaagctaacgtcaaaaagagtttatttggaccttcttcgtaaagatgacgtgctctcacacggagctgtaaccaatgagtttctgataaaatgtcatctggaagcacttggaatcgagagctcgaaaaagaaggacatccatctggattctgaccgacgtctgccgctgtacgcctacacccatgatacgttcagcctgctgctggtgccaatgataaaggaaaagaaggaagcgctgggatctatgggaaacgacgctgctctggcgtgtctctccgacttcagtcctctgctgttctcctactgccagcagctcttcgctcaggtaacgaatccacccatcgatccattccgtgaacaaatcgtgatgagtctgagatgtccagttggtccagaatccaacctactggaaccaaatgaagagctggacagccgtctaatccttgagcagcctgtgctttcgctagtggatatcgaggtgatcaaacgcacaatgtacaaaggctggcgcagcaaaaccatagacacaactttccctgtgaggtatggagtaaaaggactcgtgccaggactggaccgaatctgctgtgaagcatgcacagctgctctggatggataccagattcttgtgctgtctgatcgagctgcaagcaaagacaatgtgccaatatcctcacttttggcggtcggggccattcaccagtgccttatccgacataggttgagaatgaaggtcgctattattgtggaatctggagaagccaaggtcgtccatgatttctgtgtattgctcggattcggcgccgatgccatctgcccgtacatggtgttcgaaacaatgtatcgtcttcgccatcttggtctgctcgacaaggagttgaatgacgatatggtgttccaaggatatcgacaaggtgtggagcgaggtatcttcaaggtaatggctaaaatgggcatcagcacattgcattcgtacaagcatgcacagattttcgaaattgtcggattagcgaaggaagttgtggacatgtgcttcaagaacaccgtgtcgcgcctcggtggcgccaccttcgagattctggcggcagaggcgctgaagcgccaccgagctgcgttcccggccgccgctaacgccgacaagcacgtattcggggattcacgtgtgttggtcgcatcagggacatatcactggagagctggtggtgagaagcatatcaatgagccagaagcaatcgccaagttgcaggcagccacccgtacgaacaacgcaaaaaccttccatgagtattctcgcatatcaaatctccagcagagatggtgcaccctcagaggccaacttgaaattaagaccagcaacaagcttgaaatccccatggatcaggtggaacctgcgagtgagatcgtgaagcgatttgttactggagcgatgtctttcggatcaatttcgtgggaggcccacacaactcttgcgattgcgatgaatcgcataggagcgaagtccaacacaggagaaggtggtgaaaagccggagcgatacgcgagtaaccaagatgcgaacaataacctgcgttcagccatcaagcaggttgcttctgctagatttggtgttacctcctcctatctggccaatgctgatgaactgcaaatcaaaatggctcaaggtgccaagccgggagaaggtggtgaacttcccggtcataaggtaaccaaggacatcgccgacactagaaagtcaacggcgggagtagggctgatctcgccaccgccacaccacgatatctactcgatcgaggatctcgctcaactgatctacgatctgaaatgcgccaatcccgaagcgagggtgagcgtgaagctcgtctccgaggcaggtgtgggcatcattgcgtcgggagttgtgaaaggaaatgcggatcatgttaccatctccggtcatgatggtggcacaggagcttccagctggactggcatcaaacacgctggtctgccttgggaacttggtgtggccgaaactcaccaggtactcactatgaacaacctcaggagtcgggtgattctacaagctgatggccaaatcaggaccggtcgtgatgttatgattgctgcactgctgggagcagatgagttcggtatgtccaccgcacctctcatcgttctcggatgtacaatgatgagaaaatgccatctaaatacttgcccagtcggaattgccactcaggatcctgttcttcgtgctaaatttgagggaaagccagaacatgtagtaaacttcatgttcatggttgccgaagaagtccgttatttccttgcgagattaggtctccgaaccctcagcgaggctattggacgcacagatctgctgtacgctaatcctaatcctgtcaacaagaaggcaacgatgcttgaattcggttccattctcaagaatgttcatcacatgttcccgaacgtgtctaccaagggaggaacagtcaagcagactattgaacttggtgaactggagcaggagatcctgaaacgtctcgataaagtgttcagtaattctggagagcatcttgtgatctccaggaaaaccatcactaatctggatcgtgcgtttggcacaagaatcagctacgaaatctccaagcgcttcggtgaagaaggactcaacggtacaagatcgattaaaatcctcttggatggctcagccggtcaatcgttctgtgcattcctcgctaaaggtgtcacggtcgagttggaaggggatgcaaatgactatgttgggaagtgcctatctggaggtactgtgattgtatatcctccgaaaaaggcggcttacaaatcggaggagaactcaatcatcggaaacgtcgctctctacggtgcaacgtctggtgactgctggttccgtggtgtagccggagagcgcttcgctgtcagaaactcgggttgcatcgctgtggtcgaagcggtcggtgaccatgcatgtgaatacatgactggtggaagagtaattgtgctgggacccataggaagaaacttcgctgccgctatgagcggtggaatcgcgttcctctttaaccagggcgatccgttcactcaccgaatcaacgttgccaccgtcgatctggatccacccagcgaagatgacctcgtgtttattcgtgacaggataaaaaaatttgtcgaactcacaggatccgagctaggccaacacatccttgacaattggcagactgaacatgcaaaaattatcaaggtattcccacgtgactacaaaagagtgcttctggagcaggaagaagagaggaaacgaatcgctgagcagaaagctgctaaggagaaggtttgttctaatgtacataaatgtgtggacccgcacggctatttttcaagcttagtctcgccttccttctattacgaatccaaacattggcgcaattctagacaactattatttaacaaattattagctcttttggaggcggatgaagaagatgacatggaaggaccaggacgtcctcgtcaacgcaccctttccatggatatgcagattgctccaacactcattcacaagaagaagcttcttacaaagagaaagctcagcgtagcacagcgcaaacgaagatcttcgaaaaatcctcgaccacaggatgtcgcaggattcgaggatgaggaggatttgcaggatgctatcgaggataatgaagaagatgagactaagtcagacaatgatgaggaactgctgtctgatgatgaaatgttccactcgaacgatttcctgcgtcatatcaacagagaccttgacattgagaatatcgtggtgcctcctcatttgaagaagaatgacgaacctctcgataagctccgtggatttgtcaagtacaaccgccagaaaaagatttaccgttctcccgaggagcgtctgaaagattgggatgaggtgtacgacttcgagtctgttcgcagcaacattcgtgaacaagctgcaaggtgcatggattgtggtgtgccattctgtcaaggaaatactggctgtcccctcggcaacattatccctaaatggaacgactacgtcttcaagaagaactggcgtcaagctcttgagcagctgttgcagaccaacaacttccccgaattcactggaagagtgtgtccagcgccgtgtgagggtgcttgctgcttagcaatcagctcacctgccgttactatcaagtccattgaatgtgcgattattgattacgcgttcatgcaagggtggatcaaggcccaccccccggtggagaacactggaaagcgcattgcgatcgtaggatctgggccagctggtatctga

SEQ ID NO: 334 - DNA, 4461 bp, Ancylostoma ceylanicum
atggcgacgtcgtggaaaatgagcagcagagcgcatgaggatcgtctgaaacctggaagaatgctcttggtggatacctacgagaagaagatcgaacaagatgaggatttgaaacggcgcatcgcacagtcgaggccacacaagaagctaacgtcaaaaagagtttatttggaccttcttcgtaaagatgacgtgctctcacacggagctgtaaccaatgagtttctgataaaatgtcatctggaagcacttggaatcgagagctcgaaaaagaaggacatccatctggattctgaccgacgtctgccgctgtacgcctacacccatgatacgttcagcctgctgctggtgccaatgataaaggaaaagaaggaagcgctgggatctatgggaaacgacgctgctctggcgtgtctctccgacttcagtcctctgctgttctcctactgccagcagctcttcgctcaggtaacgaatccacccatcgatccattccgtgaacaaatcgtgatgagtctgagatgtccagttggtccagaatccaacctactggaaccaaatgaagagctggacagccgtctaatccttgagcagcctgtgctttcgctagtggatatcgaggtgatcaaacgcacaatgtacaaaggctggcgcagcaaaaccatagacacaactttccctgtgaggtatggagtaaaaggactcgtgccaggactggaccgaatctgctgtgaagcatgcacagctgctctggatggataccagattcttgtgctgtctgatcgagctgcaagcaaagacaatgtgccaatatcctcacttttggcggtcggggccattcaccagtgccttatccgacataggttgagaatgaaggtcgctattattgtggaatctggagaagccaaggtcgtccatgatttctgtgtattgctcggattcggcgccgatgccatctgcccgtacatggtgttcgaaacaatgtatcgtcttcgccatcttggtctgctcgacaaggagttgaatgacgatatggtgttccaaggatatcgacaaggtgtggagcgaggtatcttcaaggtaatggctaaaatgggcatcagcacattgcattcgtacaagcatgcacagattttcgaaattgtcggattagcgaaggaagttgtggacatgtgcttcaagaacaccgtgtcgcgcctcggtggcgccaccttcgagattctggcggcagaggcgctgaagcgccaccgagctgcgttcccggccgccgctaacgccgacaagcacgtattcggggattcacgtgtgttggtcgcatcagggacatatcactggagagctggtggtgagaagcatatcaatgagccagaagcaatcgccaagttgcaggcagccacccgtacgaacaacgcaaaaaccttccatgagtattctcgcatatcaaatctccagcagagatggtgcaccctcagaggccaacttgaaattaagaccagcaacaagcttgaaatccccatggatcaggtggaacctgcgagtgagatcgtgaagcgatttgttactggagcgatgtctttcggatcaatttcgtgggaggcccacacaactcttgcgattgcgatgaatcgcataggagcgaagtccaacacaggagaaggtggtgaaaagccggagcgatacgcgagtaaccaagatgcgaacaataacctgcgttcagccatcaagcaggttgcttctgctagatttggtgttacctcctcctatctggccaatgctgatgaactgcaaatcaaaatggctcaaggtgccaagccgggagaaggtggtgaacttcccggtcataaggtaaccaaggacatcgccgacactagaaagtcaacggcgggagtagggctgatctcgccaccgccacaccacgatatctactcgatcgaggatctcgctcaactgatctacgatctgaaatgcgccaatcccgaagcgagggtgagcgtgaagctcgtctccgaggcaggtgtgggcatcattgcgtcgggagttgtgaaaggaaatgcggatcatgttaccatctccggtcatgatggtggcacaggagcttccagctggactggcatcaaacacgctggtctgccttgggaacttggtgtggccgaaactcaccaggtactcactatgaacaacctcaggagtcgggtgattctacaagctgatggccaaatcaggaccggtcgtgatgttatgattgctgcactgctgggagcagatgagttcggtatgtccaccgcacctctcatcgttctcggatgtacaatgatgagaaaatgccatctaaatacttgcccagtcggaattgccactcaggatcctgttcttcgtgctaaatttgagggaaagccagaacatgtagtaaacttcatgttcatggttgccgaagaagtccgttatttccttgcgagattaggtctccgaaccctcagcgaggctattggacgcacagatctgctgtacgctaatcctaatcctgtcaacaagaaggcaacgatgcttgaattcggttccattctcaagaatgttcatcacatgttcccgaacgtgtctaccaagggaggaacagtcaagcagactattgaacttggtgaactggagcaggagatcctgaaacgtctcgataaagtgttcagtaattctggagagcatcttgtgatctccaggaaaaccatcactaatctggatcgtgcgtttggcacaagaatcagctacgaaatctccaagcgcttcggtgaagaaggactcaacggtacaagatcgattaaaatcctcttggatggctcagccggtcaatcgttctgtgcattcctcgctaaaggtgtcacggtcgagttggaaggggatgcaaatgactatgttgggaagtgcctatctggaggtactgtgattgtatatcctccgaaaaaggcggcttacaaatcggaggagaactcaatcatcggaaacgtcgctctctacggtgcaacgtctggtgactgctggttccgtggtgtagccggagagcgcttcgctgtcagaaactcgggttgcatcgctgtggtcgaagcggtcggtgaccatgcatgtgaatacatgactggtggaagagtaattgtgctgggacccataggaagaaacttcgctgccgctatgagcggtggaatcgcgttcctctttaaccagggcgatccgttcactcaccgaatcaacgttgccaccgtcgatctggatccacccagcgaagatgacctcgtgtttattcgtgacaggataaaaaaatttgtcgaactcacaggatccgagctaggccaacacatccttgacaattggcagactgaacatgcaaaaattatcaaggtattcccacgtgactacaaaagagtgcttctggagcaggaagaagagaggaaacgaatcgctgagcagaaagctgctaaggagaaggtttgttctaatgtacataaatgtgtggacccgcacggctatttttcaagcttagtctcgccttccttctattacgaatccaaacattggcgcaattctagacaactattatttaacaaattattagctcttttggaggcggatgaagaagatgacatggaaggaccaggacgtcctcgtcaacgcaccctttccatggatatgcagattgctccaacactcattcacaagaagaagcttcttacaaagagaaagctcagcgtagcacagcgcaaacgaagatcttcgaaaaatcctcgaccacaggatgtcgcaggattcgaggatgaggaggatttgcaggatgctatcgaggataatgaagaagatgagactaagtcagacaatgatgaggaactgctgtctgatgatgaaatgttccactcgaacgatttcctgcgtcatatcaacagagaccttgacattgagaatatcgtggtgcctcctcatttgaagaagaatgacgaacctctcgataagctccgtggatttgtcaagtacaaccgccagaaaaagatttaccgttctcccgaggagcgtctgaaagattgggatgaggtgtacgacttcgagtctgttcgcagcaacattcgtgaacaagctgcaaggtgcatggattgtggtgtgccattctgtcaaggaaatactggctgtcccctcggcaacattatccctaaatggaacgactacgtcttcaagaagaactggcgtcaagctcttgagcagctgttgcagaccaacaacttccccgaattcactggaagagtgtgtccagcgccgtgtgagggtgcttgctgcttagcaatcagctcacctgccgttactatcaagtccattgaatgtgcgattattgattacgcgttcatgcaagggtggatcaaggcccaccccccggtggagaacactggaaagcgcattgcgatcgtaggatctgggccagctggtatctga

SEQ ID NO: 335 - DNA, 960 bp, Ancylostoma ceylanicum
atgtttgttgtatatgtgacaactgtctgttcaacggcggattacgaatccaaacattggcgcaattctagacaactattatttaacaaattattagctcttttggaggcggatgaagaagatgacatggaaggaccaggacgtcctcgtcaacgcaccctttccatggatatgcagattgctccaacactcattcacaagaagaagcttcttacaaagagaaagctcagcgtagcacagcgcaaacgaagatcttcgaaaaatcctcgaccacaggatgtcgcaggattcgaggatgaggaggatttgcaggatgctatcgaggataatgaagaagatgagactaagtcagacaatgatgaggaactgctgtctgatgatgaaatgttccactcgaacgatttcctgcgtcatatcaacagagaccttgacattgagaatatcgtggtgcctcctcatttgaagaagaatgacgaacctctcgataagctccgtggatttgtcaagtacaaccgccagaaaaagatttaccgttctcccgaggagcgtctgaaagattgggatgaggtgtacgacttcgagtctgttcgcagcaacattcgtgaacaagctgcaaggtgcatggattgtggtgtgccattctgtcaaggaaatactggctgtcccctcggcaacattatccctaaatggaacgactacgtcttcaagaagaactggcgtcaagctcttgagcagctgttgcagaccaacaacttccccgaattcactggaagagtgtgtccagcgccgtgtgagggtgcttgctgcttagcaatcagctcacctgccgttactatcaagtccattgaatgtgcgattattgattacgcgttcatgcaagggtggatcaaggcccaccccccggtggagaacactggaaagcgcattgcgatcgtaggatctgggccagctggtatctga

SEQ ID NO: 336 - DNA, 1659 bp, Ancylostoma ceylanicum
atgatagagtctgactacccaccaaccccgttggtgaatgaaccgtatcacgaaattgtgctgcgagcgatcaagcggcaaattgacaccgggaagaataaaatcgcatttataaaaggtgaaaggctgaatgaggtggtcacatacaggcaagtctacgacaatgcctattctattgccgcattcctctattcacgaggctttgggaaagacgtcgcatgtgcagtgatcccgaacctctggcagtactcggcgttcttcctgggtgtagccctgagaggcggcgccatctctggagcatccgcgatgttcacggactatgagctgcagcgtcaatttgtcgactctggcgcgaaagttgtactcacttcggaggagtacctggagaaggttttgaaggcggtaaagcaaagccccaaggttgagcttgtgatctacatcccgaaatctgaggatcatccggtccctgatggagttgtaagctggaacgaagtcgtcaaagcacgttattcgagcagtatcccgaaaccaaacattgacttggacaacgacattattatcctaccctattccagtggaaccaccggagctccaaaaggcgtcatgctttctcacaggaacttcgcgatgatgataggcatctacaaacagcacgagtccaccaatatcgtgccgctactctctgatgactgggactatgagaaggagaagtttatgctcttcttgccattctaccatgtgtacggtttcggtctcgtcaatctcagcttgctccaaggcagcacagggattatcttcacccatttcgagcctcataccttctgcagagctattcaggattacaaggttagcttcctcccacttgtgccaccaattatggtattcttggcgaagcaccccatctgcgacgagtacgacctttcctccataaagctactagtttgtggagcagcaccggccgggaaggacatttgtgaagagctatccaggaagtacccaaacatgaagtacatccaacaaggctatggcatgacagaatgtacaatgtcctcacacctcccggacctcaagaacagtgtcccattcggaagtgttggaaaacttgcctctaatatgcacatgaagattgtcgacccatcaactggaaaagaaatgccaccaggaatgagcggtgaaatttgcatcagaggacccaccgtaatgctaggatatctaggcaagccagatgcaaccaaaagcaccatcatcaatggctggcttcataccggtactgtattgtttgtcgtattaggtgatatcggctatgtggacgagtaccgtaacctgtttatcgtggatcggctcaaggaattgatcaaagttaaaggacttcaggtagccccggcagagttggaggatcttctcctggcccatcctttgatccgcgatgccgccgtcattggaatccctgacaagagagccggcgaattgcctcgagcttttgtggtcagggcatcggatagtctgactgaggaagatgtcaagctatggatcaaagataaagtttcgccacacaagcaactcgccggcggtgttgagttcctccgagaaatcccgaaatcagctgcaggaaaaatcctgcgacgagttctacgcgaacgagtttcctcgaaactatga

SEQ ID NO: 337 - DNA, 1635 bp, Ancylostoma ceylanicum
atgatagagtctgactacccaccaaccccgttggtgaatgaaccgtatcacgaaattgtgctgcgagcgatcaagcggcaaattgacaccgggaagaataaaatcgcatttataaaaggtgaaaggctgaatgaggtggtcacatacaggcaagtctacgacaatgcctattctattgccgcattcctctattcacgaggctttgggaaagacgtcgcatgtgcagtgatcccgaacctctggcagtactcggcgttcttcctgggtgtagccctgagaggcggcgccatctctggagcatccgcgatgttcacggactatgagctgcagcgtcaatttgtcgactctggcgcgaaagttgtactcacttcggaggagtacctggagaaggttttgaaggcggtaaagcaaagccccaaggttgagcttgtgatctacatcccgaaatctgaggatcatccggtccctgatggagttgtaagctggaacgaagtcgtcaaagcacgttattcgagcagtatcccgaaaccaaacattgacttggacaacgacattattatcctaccctattccagtggaaccaccggagctccaaaaggcgtcatgctttctcacaggaacttcgcgatgatgataggcatctacaaacagcacgagtccaccaatatcgtgccgctactctctgatgactgggactatgagaaggagaagtttatgctcttcttgccattctaccatgtgtacggtttcggtctcgtcaatctcagcttgctccaaggcagcacagggattatcttcacccatttcgagcctcataccttctgcagagctattcaggattacaaggttagcttcctcccacttgtgccaccaattatggtattcttggcgaagcaccccatctgcgacgagtacgacctttcctccataaagctactagtttgtggagcagcaccggccgggaaggacatttgtgaagagctatccaggaagtacccaaacatgaagtacatccaacaaggctatggcatgacagaatgtacaatgtcctcacacctcccggacctcaagaacagtgtcccattcggaagtgttggaaaacttgcctctaatatgcacatgaagattgtcgacccatcaactggaaaagaaatgccaccaggaatgagcggtgaaatttgcatcagaggacccaccgtaatgctaggatatctaggcaagccagatgcaaccaaaagcaccatcatcaatggctggcttcataccggtgatatcggctatgtggacgagtaccgtaacctgtttatcgtggatcggctcaaggaattgatcaaagttaaaggacttcaggtagccccggcagagttggaggatcttctcctggcccatcctttgatccgcgatgccgccgtcattggaatccctgacaagagagccggcgaattgcctcgagcttttgtggtcagggcatcggatagtctgactgaggaagatgtcaagctatggatcaaagataaagtttcgccacacaagcaactcgccggcggtgttgagttcctccgagaaatcccgaaatcagctgcaggaaaaatcctgcgacgagttctacgcgaacgagtttcctcgaaactatga

SEQ ID NO: 338 - DNA, 636 bp, Ancylostoma ceylanicum
atgaagccacacgtagtggttggctatggcatgacagaatgtacaatgtcctcacacctcccggacctcaagaacagtgtcccattcggaagtgttggaaaacttgcctctaatatgcacatgaagattgtcgacccatcaactggaaaagaaatgccaccaggaatgagcggtgaaatttgcatcagaggacccaccgtaatgctaggatatctaggcaagccagatgcaaccaaaagcaccatcatcaatggctggcttcataccggtgatatcggctatgtggacgagtaccgtaacctgtttatcgtggatcggctcaaggaattgatcaaagttaaaggacttcaggtagccccggcagagttggaggatcttctcctggcccatcctttgatccgcgatgccgccgtcattggaatccctgacaagagagccggcgaattgcctcgagcttttgtggtcagggcatcggatagtctgactgaggaagatgtcaagctatggatcaaagataaagtttcgccacacaagcaactcgccggcggtgttgagttcctccgagaaatcccgaaatcagctgcaggaaaaatcctgcgacgagttctacgcgaacgagtttcctcgaaactatga

SEQ ID NO: 339 - DNA, 699 bp, Ancylostoma ceylanicum
atgtgcaggcgatgtcctgtgaaggtcttctatcacttcatgaagccacacgtagtggttggctatggcatgacagaatgtacaatgtcctcacacctcccggacctcaagaacagtgtcccattcggaagtgttggaaaacttgcctctaatatgcacatgaagattgtcgacccatcaactggaaaagaaatgccaccaggaatgagcggtgaaatttgcatcagaggacccaccgtaatgctaggatatctaggcaagccagatgcaaccaaaagcaccatcatcaatggctggcttcataccggtactgtattgtttgtcgtattaggtgatatcggctatgtggacgagtaccgtaacctgtttatcgtggatcggctcaaggaattgatcaaagttaaaggacttcaggtagccccggcagagttggaggatcttctcctggcccatcctttgatccgcgatgccgccgtcattggaatccctgacaagagagccggcgaattgcctcgagcttttgtggtcagggcatcggatagtctgactgaggaagatgtcaagctatggatcaaagataaagtttcgccacacaagcaactcgccggcggtgttgagttcctccgagaaatcccgaaatcagctgcaggaaaaatcctgcgacgagttctacgcgaacgagtttcctcgaaactatga

SEQ ID NO: 340 - DNA, 675 bp, Ancylostoma ceylanicum
atgtgcaggcgatgtcctgtgaaggtcttctatcacttcatgaagccacacgtagtggttggctatggcatgacagaatgtacaatgtcctcacacctcccggacctcaagaacagtgtcccattcggaagtgttggaaaacttgcctctaatatgcacatgaagattgtcgacccatcaactggaaaagaaatgccaccaggaatgagcggtgaaatttgcatcagaggacccaccgtaatgctaggatatctaggcaagccagatgcaaccaaaagcaccatcatcaatggctggcttcataccggtgatatcggctatgtggacgagtaccgtaacctgtttatcgtggatcggctcaaggaattgatcaaagttaaaggacttcaggtagccccggcagagttggaggatcttctcctggcccatcctttgatccgcgatgccgccgtcattggaatccctgacaagagagccggcgaattgcctcgagcttttgtggtcagggcatcggatagtctgactgaggaagatgtcaagctatggatcaaagataaagtttcgccacacaagcaactcgccggcggtgttgagttcctccgagaaatcccgaaatcagctgcaggaaaaatcctgcgacgagttctacgcgaacgagtttcctcgaaactatga

SEQ ID NO: 341 - DNA, 1827 bp, Ancylostoma ceylanicum
atggataaaattttaagtagtcacctgtttgtggtgacgctaccatctaccgctgaattctgctaccatctgaattctgctagtaaaggcctactgctgttggtactgccaagagaaaggctcgcaatgaggtggaagcgaccgtggccgcggataagtatccgaatgtccagtgctttgaacgtcagcaaaaattcaatgctgataaagtccgactatcctccagtgccgataccacattcgtcttttccacaaaccgtactgactgctctggaaaaacacatcagccacaataggactgcatttatttgtgccgagaccgacaagcaggtcacgtttaaaagcgtttaccacgccgcctacgctctggcgacattcctccatgagaagggattccataaggaagttgcttgcgccgtgctgccaaatcagtgggaatgggcggcgatttttctcggagtgaccttgaacggcggtgttctcactaccagtagcgcagtctccacagaatatgagctccaacggcagtttgcggatagcggtacgaaagttgtatttactaactcagattgcctggaaaaggtgcagaaagctgcgaggctatctcctacagtgaagatcataatctgtctcggagaaaaatccacaccgactctgcaagtcgacacctatcgatggaacgatctcttaacaactcagcctaactggagtcttgcagcgccttccgttgacgccgaacgagatgcagtgttcatgccctactcaagcggcactacgggagtcccgaaaggagttatgttaacgcacaagaattattgtgccatgttgaacatatacctgaggcacgacgcagaacgaatgaccggggctttgactcctccatggaataatgacaaggataagcatctgtttcttctgccgttctatcattgctacggatttgcccttctgatgggatcgcttctgaacggtgctacggccgtcgtgatgtcacatttccagccagaactgttctgtgcatcgattcaaaaacatcgaatccggtttgttccggttgttccgccgataatggtgttccttgccaagagccccatttgccagcgatatgatctctcctctcttcaattccttctcagtggagctgcacccgccggaaaggacctatgcgaggagctgtcaaggaaatacaaaaacatgacgcatatccaacaaggttatggaatgtctgaggtgtccatggcatcgcacctgccagacattgttgacggtcaaccatttggaagcgttggaaagctagcatcgaatttggaaatgaagatagtcaatccagaaaaccacatggagagaaagcgtggcgaggtgggagaaatatgcattcgcggtccaacagtgatgcttggctacatcaacaagccaaaagaaacaagcgaatgcatcaaggatggatggatgcatacaggcgatcttggttatgtagataacaagggctacctctttattgtggatcgtctcaaggagctcataaaagtcaaaggattccaggtacctcctgcggagttggagaacatattattatgtcatccgttaatccaagacgtcgcggttattggaataccagacgcagacacaggagaggctcctaaggcatacgtggttcgcagttccaacgacttgactgaggaagaggtgaaattgtttgtcaaagacaaagtctcgccgtacaagcagctttctggaggtgtggagtttgttaaagaaattccaaaatcaccatcaggaaaaatattgagacgattactgcgcgaacgaagccattctaaactgtga

SEQ ID NO: 342 - DNA, 1818 bp, Ancylostoma ceylanicum
atgaaaagtagtcacctgtttgtggtgacgctaccatctaccgctgaattctgctaccatctgaattctgctagtaaaggcctactgctgttggtactgccaagagaaaggctcgcaatgaggtggaagcgaccgtggccgcggataagtatccgaatgtccagtgctttgaacgtcagcaaaaattcaatgctgataaagtccgactatcctccagtgccgataccacattcgtcttttccacaaaccgtactgactgctctggaaaaacacatcagccacaataggactgcatttatttgtgccgagaccgacaagcaggtcacgtttaaaagcgtttaccacgccgcctacgctctggcgacattcctccatgagaagggattccataaggaagttgcttgcgccgtgctgccaaatcagtgggaatgggcggcgatttttctcggagtgaccttgaacggcggtgttctcactaccagtagcgcagtctccacagaatatgagctccaacggcagtttgcggatagcggtacgaaagttgtatttactaactcagattgcctggaaaaggtgcagaaagctgcgaggctatctcctacagtgaagatcataatctgtctcggagaaaaatccacaccgactctgcaagtcgacacctatcgatggaacgatctcttaacaactcagcctaactggagtcttgcagcgccttccgttgacgccgaacgagatgcagtgttcatgccctactcaagcggcactacgggagtcccgaaaggagttatgttaacgcacaagaattattgtgccatgttgaacatatacctgaggcacgacgcagaacgaatgaccggggctttgactcctccatggaataatgacaaggataagcatctgtttcttctgccgttctatcattgctacggatttgcccttctgatgggatcgcttctgaacggtgctacggccgtcgtgatgtcacatttccagccagaactgttctgtgcatcgattcaaaaacatcgaatccggtttgttccggttgttccgccgataatggtgttccttgccaagagccccatttgccagcgatatgatctctcctctcttcaattccttctcagtggagctgcacccgccggaaaggacctatgcgaggagctgtcaaggaaatacaaaaacatgacgcatatccaacaaggttatggaatgtctgaggtgtccatggcatcgcacctgccagacattgttgacggtcaaccatttggaagcgttggaaagctagcatcgaatttggaaatgaagatagtcaatccagaaaaccacatggagagaaagcgtggcgaggtgggagaaatatgcattcgcggtccaacagtgatgcttggctacatcaacaagccaaaagaaacaagcgaatgcatcaaggatggatggatgcatacaggcgatcttggttatgtagataacaagggctacctctttattgtggatcgtctcaaggagctcataaaagtcaaaggattccaggtacctcctgcggagttggagaacatattattatgtcatccgttaatccaagacgtcgcggttattggaataccagacgcagacacaggagaggctcctaaggcatacgtggttcgcagttccaacgacttgactgaggaagaggtgaaattgtttgtcaaagacaaagtctcgccgtacaagcagctttctggaggtgtggagtttgttaaagaaattccaaaatcaccatcaggaaaaatattgagacgattactgcgcgaacgaagccattctaaactgtga

SEQ ID NO: 343 - DNA, 1884 bp, Ancylostoma ceylanicum
atgtataaaataaagaaaacaacattcgcgtattcgactccgaataatttgaaaatcaaagtgatcagagaatgtagtcacctgtttgtggtgacgctaccatctaccgctgaattctgctaccatctgaattctgctagtaaaggcctactgctgttggtactgccaagagaaaggctcgcaatgaggtggaagcgaccgtggccgcggataagtatccgaatgtccagtgctttgaacgtcagcaaaaattcaatgctgataaagtccgactatcctccagtgccgataccacattcgtcttttccacaaaccgtactgactgctctggaaaaacacatcagccacaataggactgcatttatttgtgccgagaccgacaagcaggtcacgtttaaaagcgtttaccacgccgcctacgctctggcgacattcctccatgagaagggattccataaggaagttgcttgcgccgtgctgccaaatcagtgggaatgggcggcgatttttctcggagtgaccttgaacggcggtgttctcactaccagtagcgcagtctccacagaatatgagctccaacggcagtttgcggatagcggtacgaaagttgtatttactaactcagattgcctggaaaaggtgcagaaagctgcgaggctatctcctacagtgaagatcataatctgtctcggagaaaaatccacaccgactctgcaagtcgacacctatcgatggaacgatctcttaacaactcagcctaactggagtcttgcagcgccttccgttgacgccgaacgagatgcagtgttcatgccctactcaagcggcactacgggagtcccgaaaggagttatgttaacgcacaagaattattgtgccatgttgaacatatacctgaggcacgacgcagaacgaatgaccggggctttgactcctccatggaataatgacaaggataagcatctgtttcttctgccgttctatcattgctacggatttgcccttctgatgggatcgcttctgaacggtgctacggccgtcgtgatgtcacatttccagccagaactgttctgtgcatcgattcaaaaacatcgaatccggtttgttccggttgttccgccgataatggtgttccttgccaagagccccatttgccagcgatatgatctctcctctcttcaattccttctcagtggagctgcacccgccggaaaggacctatgcgaggagctgtcaaggaaatacaaaaacatgacgcatatccaacaaggttatggaatgtctgaggtgtccatggcatcgcacctgccagacattgttgacggtcaaccatttggaagcgttggaaagctagcatcgaatttggaaatgaagatagtcaatccagaaaaccacatggagagaaagcgtggcgaggtgggagaaatatgcattcgcggtccaacagtgatgcttggctacatcaacaagccaaaagaaacaagcgaatgcatcaaggatggatggatgcatacaggcgatcttggttatgtagataacaagggctacctctttattgtggatcgtctcaaggagctcataaaagtcaaaggattccaggtacctcctgcggagttggagaacatattattatgtcatccgttaatccaagacgtcgcggttattggaataccagacgcagacacaggagaggctcctaaggcatacgtggttcgcagttccaacgacttgactgaggaagaggtgaaattgtttgtcaaagacaaagtctcgccgtacaagcagctttctggaggtgtggagtttgttaaagaaattccaaaatcaccatcaggaaaaatattgagacgattactgcgcgaacgaagccattctaaactgtga

SEQ ID NO: 344 - DNA, 1893 bp, Ancylostoma ceylanicum
atgttgataatgtataaaataaagaaaacaacattcgcgtattcgactccgaataatttgaaaatcaaagtgatcagagaatgtagtcacctgtttgtggtgacgctaccatctaccgctgaattctgctaccatctgaattctgctagtaaaggcctactgctgttggtactgccaagagaaaggctcgcaatgaggtggaagcgaccgtggccgcggataagtatccgaatgtccagtgctttgaacgtcagcaaaaattcaatgctgataaagtccgactatcctccagtgccgataccacattcgtcttttccacaaaccgtactgactgctctggaaaaacacatcagccacaataggactgcatttatttgtgccgagaccgacaagcaggtcacgtttaaaagcgtttaccacgccgcctacgctctggcgacattcctccatgagaagggattccataaggaagttgcttgcgccgtgctgccaaatcagtgggaatgggcggcgatttttctcggagtgaccttgaacggcggtgttctcactaccagtagcgcagtctccacagaatatgagctccaacggcagtttgcggatagcggtacgaaagttgtatttactaactcagattgcctggaaaaggtgcagaaagctgcgaggctatctcctacagtgaagatcataatctgtctcggagaaaaatccacaccgactctgcaagtcgacacctatcgatggaacgatctcttaacaactcagcctaactggagtcttgcagcgccttccgttgacgccgaacgagatgcagtgttcatgccctactcaagcggcactacgggagtcccgaaaggagttatgttaacgcacaagaattattgtgccatgttgaacatatacctgaggcacgacgcagaacgaatgaccggggctttgactcctccatggaataatgacaaggataagcatctgtttcttctgccgttctatcattgctacggatttgcccttctgatgggatcgcttctgaacggtgctacggccgtcgtgatgtcacatttccagccagaactgttctgtgcatcgattcaaaaacatcgaatccggtttgttccggttgttccgccgataatggtgttccttgccaagagccccatttgccagcgatatgatctctcctctcttcaattccttctcagtggagctgcacccgccggaaaggacctatgcgaggagctgtcaaggaaatacaaaaacatgacgcatatccaacaaggttatggaatgtctgaggtgtccatggcatcgcacctgccagacattgttgacggtcaaccatttggaagcgttggaaagctagcatcgaatttggaaatgaagatagtcaatccagaaaaccacatggagagaaagcgtggcgaggtgggagaaatatgcattcgcggtccaacagtgatgcttggctacatcaacaagccaaaagaaacaagcgaatgcatcaaggatggatggatgcatacaggcgatcttggttatgtagataacaagggctacctctttattgtggatcgtctcaaggagctcataaaagtcaaaggattccaggtacctcctgcggagttggagaacatattattatgtcatccgttaatccaagacgtcgcggttattggaataccagacgcagacacaggagaggctcctaaggcatacgtggttcgcagttccaacgacttgactgaggaagaggtgaaattgtttgtcaaagacaaagtctcgccgtacaagcagctttctggaggtgtggagtttgttaaagaaattccaaaatcaccatcaggaaaaatattgagacgattactgcgcgaacgaagccattctaaactgtga

SEQ ID NO: 345 - DNA, 3291 bp, Ancylostoma ceylanicum
atgttgttgattctggagttgtgtcttcaacagccgacaaacttcgatgcagttttcggcaatctagtcagtcaactcggcttcaattcggttgcgttctggaaaattgctgttcccttggtttacgactcagacttgtcctttggtacaaagttccgagattcactgctgttctcacttgctctctatgatgttaacaacagcaaaaaccgcttgcgtgaattatacgcagccgtccctggggtgcgtcagagcatgctaggggtccacgccaagagatttggtgagaagtaccgtcacattcagatggttcgatctcgtgcaaattcgcgtatgtcatcgaggcacggctcaatggaagatctgcttgcccttgataatgacgctatcgatgatggatctgggggccttgtgtcttgtgttgatcctgtgatgtctgtagacaaggagaacatttggctttcgaacctgggaattaacatcaaggaagagcgagatgatttggatattcatccaccatctaccaactcacttggtctccctctcataaagcaggcaagagctggagaaatcttccacgtcttagaggagaatgataagaagcaagaactgacagataaagagcaacttgtagaacgagacatgtctcttttatcagtgttgcacgattacaacaagacgaactaccagctgaaccctgtatttgtgagccaggaagactacaatgcctactatggaggaattagcaatgggttattgtggccagctttacataacctagctgagtacattgttaaggagtacgacgatcccgctactcttcgggagcattggtgtgcttatgtgcgtgtaaactaccagttcggcataaatgccgcacgtaacagtcgtccacaagatttcatttggattcacgactatcatcttatgttgacaggtcaaattatgcgtagtttggatagtaatcttgaggttggattctttctacacattcctttccaacccccagcaaatttcatgacgaagtacaagctggttgctgatccgatactccgtggtattctccgtttcaccaaggtgggtttccaaacccaccgcgaccgcgaacgatacgttcagatggtgagagagtatatcccacgagcgagagttcactacgacactaggatcgatatcttcacaattacatatgaaggttggacttgctcgctgggtgtattcccggtatccattaaaaacgaagacttcctttcaattgcaaatgaacctcagtgcgccatcgaggctcaggagatcaaacaggaggttcttgctcacagtggcgaaggtggctgctttttcttttctgttgaaagattcgactacactaaaggtatcatggagaaactcagggcatggaagaggtttttcgaaaagcatccggaaagaaaaggtctggatgtgttgtatcaggttgcggtgactaatagacgtgctgtggagtcgtataaaaaatatcaggacagttgcttggcgttggcgaaggagataaatgatactatcaagtgtgacacgaatcccgaatggaagccactacgattcgaaaccgatggtctaccacgaacacgcctagtagctcactacttggccatggatattggcgttgtgacaccatccaaggatggcatgaatttggttgccaaggaaatgatggtgtgcaatccagcagcttctcttgtgctttcatccggagctggaactgaggtgcaacttggaaacgcagggttctattcagaggacaagaaatgttaccatcgagtcgatgatattgcagatactgagaactttgcggaagtgttctatcgcgcagccactgaagagcgtgccgtgagacaagaacacggaggtcgcttgaaccaatttttgaagagccatgatatcgatgagtggagcacagcttttctggaccctagctggactcatgaagtcattcgaccatgcgagatcaagcagatcgctgacttctacatgctcatggctcaaacagcgcaaatccgtcggcagattgtggaagtagttctaaagggtatgccgattcggcctcacttcgccctttcgctggagaatgccaagaactcacttgaaaacagctgcatctccgattcgaatcgtctcgtgctcgaaacaacctgtcatcaggaagacgctgatggcgctaatacccacgccacatttgatattactgatgaactaacggaacttcagaaagatcttgcattcctttcattcatccaatcagatgagaccaacaacgttgagcagttcatagatacgcttggttctttccatccatctggaccaacggcttttgcagcagaagtggagaaggcttccacactcctctctcagggcgaccatttccactatgtgttcacagacagggatggtaccttgaaaagctactcatgctcgtatccgaccagtgtgcagccagcctattctgctgtcattcaggctcaatttgcccgtcgatgtgcccagttttgtgcaatcgtcactacagcgccacttgttcacatcggaatcctcaacatgagcacaatgccagaaggatactacgcctacggtgcttctgctggccgtgagtggtacttcaatcctgccatgcaatttaaggacgacagtgttagcgatgcggaccttatgctacttaacaaggctttcgataaggttgaagatttgctggaaaatccagagttccgcaatttcacatggattggtagcggccttcagaagcattatgggcatatcaccattgccaagcaggatgtaaacaattcaattccgcacaggaagagtttattgctgtttgatgaagtgagcaaaatcgtcaatgaggttgacccttctggagctatcctgacgattagagaaaacgaatacgacatcaaaatctatacgaaagcaaaactttctggtcgaattttcaataaaggtcatggtgttcgtctcatcgaacgaaaaatgggtatgcagttgcatgacggtaacatacttgtatgcggtgactccgaaactgatctcccaatgttagaggagtgtttgtcggttgctccaccgaacgtctacacaatatgggtgacgaaggatgaagcgctacaggagaaggtgacgcagacctgtgcgcgattccataacaacaacgttacatttgtctcctgccccgaggtgctactcggagcgatggcacaggctaccgtacgtgaactggaaattcgtggcggagacttggatgacgattccgatatataa

SEQ ID NO: 346 - DNA, 3447 bp, Ancylostoma ceylanicum
atgttgttgattctggagttgtgtcttcaacagccgacaaacttcgatgcagttttcggcaatctagtcagtcaactcggcttcaattcggttgcgttctggaaaattgctgttcccttggtttacgactcagacttgtcctttggtacaaagttccgagattcactgctgttctcacttgctctctatgatgttaacaacagcaaaaaccgcttgcgtgaattatacgcagccgtccctggggtgcgtcagagcatgctaggggtccacgccaagagatttggtgagaagtaccgtcacattcagatggttcgatctcgtgcaaattcgcgtatgtcatcgaggcacggctcaatggaagatctgcttgcccttgataatgacgctatcgatgatggtgggtcagatggagcaagcgagggactgtcgaccggtactggtgttggaggactcacgaacacttcacatcataagcaaagagtaataaatgtctcgaatgcgccaccggtatccattcaacgaaagggtagtgggtgttgggaaataaaacaaggatctgggggccttgtgtcttgtgttgatcctgtgatgtctgtagacaaggagaacatttggctttcgaacctgggaattaacatcaaggaagagcgagatgatttggatattcatccaccatctaccaactcacttggtctccctctcataaagcaggcaagagctggagaaatcttccacgtcttagaggagaatgataagaagcaagaactgacagataaagagcaacttgtagaacgagacatgtctcttttatcagtgttgcacgattacaacaagacgaactaccagctgaaccctgtatttgtgagccaggaagactacaatgcctactatggaggaattagcaatgggttattgtggccagctttacataacctagctgagtacattgttaaggagtacgacgatcccgctactcttcgggagcattggtgtgcttatgtgcgtgtaaactaccagttcggcataaatgccgcacgtaacagtcgtccacaagatttcatttggattcacgactatcatcttatgttgacaggtcaaattatgcgtagtttggatagtaatcttgaggttggattctttctacacattcctttccaacccccagcaaatttcatgacgaagtacaagctggttgctgatccgatactccgtggtattctccgtttcaccaaggtgggtttccaaacccaccgcgaccgcgaacgatacgttcagatggtgagagagtatatcccacgagcgagagttcactacgacactaggatcgatatcttcacaattacatatgaaggttggacttgctcgctgggtgtattcccggtatccattaaaaacgaagacttcctttcaattgcaaatgaacctcagtgcgccatcgaggctcaggagatcaaacaggaggttcttgctcacagtggcgaaggtggctgctttttcttttctgttgaaagattcgactacactaaaggtatcatggagaaactcagggcatggaagaggtttttcgaaaagcatccggaaagaaaaggtctggatgtgttgtatcaggttgcggtgactaatagacgtgctgtggagtcgtataaaaaatatcaggacagttgcttggcgttggcgaaggagataaatgatactatcaagtgtgacacgaatcccgaatggaagccactacgattcgaaaccgatggtctaccacgaacacgcctagtagctcactacttggccatggatattggcgttgtgacaccatccaaggatggcatgaatttggttgccaaggaaatgatggtgtgcaatccagcagcttctcttgtgctttcatccggagctggaactgaggtgcaacttggaaacgcagggttctattcagaggacaagaaatgttaccatcgagtcgatgatattgcagatactgagaactttgcggaagtgttctatcgcgcagccactgaagagcgtgccgtgagacaagaacacggaggtcgcttgaaccaatttttgaagagccatgatatcgatgagtggagcacagcttttctggaccctagctggactcatgaagtcattcgaccatgcgagatcaagcagatcgctgacttctacatgctcatggctcaaacagcgcaaatccgtcggcagattgtggaagtagttctaaagggtatgccgattcggcctcacttcgccctttcgctggagaatgccaagaactcacttgaaaacagctgcatctccgattcgaatcgtctcgtgctcgaaacaacctgtcatcaggaagacgctgatggcgctaatacccacgccacatttgatattactgatgaactaacggaacttcagaaagatcttgcattcctttcattcatccaatcagatgagaccaacaacgttgagcagttcatagatacgcttggttctttccatccatctggaccaacggcttttgcagcagaagtggagaaggcttccacactcctctctcagggcgaccatttccactatgtgttcacagacagggatggtaccttgaaaagctactcatgctcgtatccgaccagtgtgcagccagcctattctgctgtcattcaggctcaatttgcccgtcgatgtgcccagttttgtgcaatcgtcactacagcgccacttgttcacatcggaatcctcaacatgagcacaatgccagaaggatactacgcctacggtgcttctgctggccgtgagtggtacttcaatcctgccatgcaatttaaggacgacagtgttagcgatgcggaccttatgctacttaacaaggctttcgataaggttgaagatttgctggaaaatccagagttccgcaatttcacatggattggtagcggccttcagaagcattatgggcatatcaccattgccaagcaggatgtaaacaattcaattccgcacaggaagagtttattgctgtttgatgaagtgagcaaaatcgtcaatgaggttgacccttctggagctatcctgacgattagagaaaacgaatacgacatcaaaatctatacgaaagcaaaactttctggtcgaattttcaataaaggtcatggtgttcgtctcatcgaacgaaaaatgggtatgcagttgcatgacggtaacatacttgtatgcggtgactccgaaactgatctcccaatgttagaggagtgtttgtcggttgctccaccgaacgtctacacaatatgggtgacgaaggatgaagcgctacaggagaaggtgacgcagacctgtgcgcgattccataacaacaacgttacatttgtctcctgccccgaggtgctactcggagcgatggcacaggctaccgtacgtgaactggaaattcgtggcggagacttggatgacgattccgatatataa

SEQ ID NO: 347 - DNA, 1305 bp, Ancylostoma ceylanicum
atgttgacggcggtgctcgcattcgtgttgaatctcgcatgggccaaggaactcggatacgaaaaacttctcgacgaacagcgcatcatcagaaatctgttggaaaatccgcaaagcgactacgactggcgagtccgcccacgagggcgactcaatgagccggactacgtcgatgctgatccggtgataatcactgttaacatgtacttgaggagcatctccaaagtggatgatgtgaacatggaatactcgttgcactttacgttccgggaagaatgggtcgacgagcggctgtatttcaatagcccgactttgaagcacattgtgctatcaccagggcagaggatatgggtgcccgacacattctttcaaaacgagaaagacggtaaaaagcacgacatcgacacgccaaacatcctgattcgtgtgcacaacggcaccgctcgcatcctgtactcctgccgcctgacgctcacgctaagctgtccaatgaaattagccgactatccgctcgatgtacagacatgtgtagttgatttcgcatcgtatgcttacaccaccaaggatatagagtacggatggaaagcggacaaacctatacagatcaaagacggacttcgccaatcattgccttcttttttgctcagcaatgtgcggaccggaaactgcacatcggtcacgaacacaggtgcctactcttgtctccgcacgattatcgaactcaagagggaattcagttactacctgcttcaactttacataccttcttttatgctcgttgctgtgtcatgggtctcgttctggttggacaaggattcggtgccagcacgagtgactctgggagtgacaactctgctaacgatgacaactcaagcatcaggtgtcaatgctaatctaccaccggtgagctacaccaaagcaattgacatatggatcggtgtttgtttagcgtttatttttggtgctttgttggagttcgccttagtgaactgggccgctcgccaagatattgcagtgcaaactagcagggctcgacagcaaaatctccatatgtttttcaggaatcagaatattcgtcgcacagaagctcacccattctatgcagcaattcagtcggatacagtgttagaagaattgccatataattggtgggacaagctatggagaatcaagtacaaggaaaacagtcgaagaatagaccttatatctcgtgtgatgtttccttcattttttatgatttttaatgttacgtactggtggcgctaccttactccttatttggcggtgcaagcccagctggaatag

SEQ ID NO: 348 - DNA, 2271 bp, Ancylostoma ceylanicum
atggttgcaaaagtaaaagaagagaagaacgcggaaacaacacgtagaacagacatatggcgctcaaacaacacttgtgtgatatgccaagatcattgcccttctcgtgaggataaagacaaacatgaaaaccaaacgaaacacaaaaagaagcttctcatttatgagttcttcgccaaagaggttccaaagttcggaccttttagtggaccatccgtgcttgtgaagaggtacacagcctgtggggaacaacttgttggtctggagtgtcttcatgaacttcatttctccttcagttctcaaccgtggtgggcctgttccatttgctatgaatcaggtgctcttatggaacaggcagacgtccatctgatgtcgatgagtcacattacaacctatttggatgaatttcattcctccaaaactgcgtcgttacaaatggatggagaccgcctcaaagtgtttgaggagatcaaacgtctttgcaatgaagtcctcgaggaacaaggaggtgaacttcttccgccggagtgcttagtcatggatgcaaatattactgagaaagaggccatggcgaagctggcagtggaagccgagcggacgaaaccatcatacagaatacatacagactgcacaaatgaggctcattcgcgaaaaatcctccagtgtttgatttgtcgccagctgattgcggttaatgatgaacttctcaaacggatctggagcactcacgaactttctccggcacatcgtcaggctgtggcaattaaccaattccttgaacaatttgatgttgaatatgtgttggatacggacgttcctgcaccaaaagctccgatcaagtggaagacagaaaatgagtgtaattatggtccaatatgcggtgtgaaattccttgtaacattcaaaaagcacaacttctgccatctgtgttcttgccgagtcgaatcaatagagcagcatttttctagcgaaagccatattattcagtttttgacgctatctaaccctgtggagatgttccatgtttctcgattttcacgtaagtctcgcatgaagaaagtgctggaaatggtctcgggtcccaagttccgtttcgagaatgagcaaagccgaagggttcatgctgactggtttccgaaagatatggaacatattctaaaaccagaatcgcacgaattcccaacattgatgcccccgctttctcccctcacaatcgactcactatgcttgttttgcacggtttgctggctaacagttcgggttgataaggacgttaaggacgaaggtgaagctgtgtggaactctcattgcgctgagaaatcccattttgaatttgctattcggagggcttgctttggttttgatgacggttttttcgtgccaatgtcatcgaatattccgaaggctccctggactttgcatggaaaatggacggaagtaaaggagggtgatgaagagttttacgtgcaaacgcaaagtgatgttgggctggaattcgttgttgatgatcaagaaaaccaggaggttatttgcactttatgtgcacgttggtttcctcgtggtatggatcaacagatcaataatcacatccgatcatatcgacatcttaaccactacctgcatgttaccaaccgcaatctgctctcgatgctaatggtacagaaaacggaggctgctagcagagaactgacgttggagtggctgaaacgctccgttcatcatgatacagacgaaatgagagtgtactcacctgaaatggcgttgcgaatgaagcactggggaaccgtgcctattcggaagattgatgctgctaattacgattccacccatcgtcctgtgttcgaatgtgtaatgaatgtagtggacaaggttgcagaagacggcgccgagcttatgcaaatacctgtcagagaggctttacttgctgctgcagtgaaaatacatgcaataaagcagcgaaacggaaatgtagagaggattctttgtcggtgcacgatccatacagaaagcaggctgaatcttgtcagccaagcgctgaacattcattgcggcaaatgcccccctccaaggattcgacgcaacggctccttgcgctacaaatctacgaaaaagtcatttttgtgcgaagccggtttctttaggatcatcttatgcctgcgtttcctacactttaagaaggtgaccgcaacgaatccgtcagcacgaaacaaattgtttccggatgtgtcctgcgttgttgatgatgcgtcatctcaaatgatttttacttga

SEQ ID NO: 349 - DNA, 2301 bp, Ancylostoma ceylanicum
atggttgcaaaagtaaaagaagagaagaacgcggaaacaacacgtagaacagacatatggcgctcaaacaacacttgtgtgatatgccaagatcattgcccttctcgtgaggataaagacaaacatgaaaaccaaacgaaacacaaaaagaagcttctcatttatgagttcttcgccaaagaggttccaaagttcggaccttttagtggaccatccgtgcttgtgaagaggtacacagcctgtggggaacaacttgttggtctggagtgtcttcatgaacttcatttctccttcagttctcaaccgtggtgggcctgttccatttgctatgaatcaggtgctcttatggaacaggcagacgtccatctgatgtcgatgagtcacattacaacctatttggatgaatttcattcctccaaaactgcgtcgttacaaatggatggagaccgcctcaaagtgtttgaggagatcaaacgtctttgcaatgaagtcctcgaggaacaaggaggtgaacttcttccgccggagtgcttagtcatggatgcaaatattactgagaaagaggccatggcgaagctggcagtggaagccgagcggacgaaaccatcatacagaatacatacagactgcacaaatgaggctcattcgcgaaaaatcctccagtgtttgatttgtcgccagctgattgcggttaatgatgaacttctcaaacggatctggagcactcacgaactttctccggcacatcgtcaggctgtggcaattaaccaattccttgaacaatttgatgttgaatatgtgttggatacggacgttcctgcaccaaaagctccgatcaagtggaagacagaaaatgagtgtaattatggtccaatatgcggtgtgaaattccttgtaacattcaaaaagcacaacttctgccatctgtgttcttgccgagtcgaatcaatagagcagcatttttctagcgaaagccatattattcagtttttgacgctatctaaccctgtggagatgttccatgtttctcgattttcacgtaagtctcgcatgaagaaagtgctggaaatggtctcgggtcccaagttccgtttcgagaatgagcaaagccgaagggttcatgctgactggtttccgaaagatatggaacatattctaaaaccagaatcgcacgaattcccaacattgatgcccccgctttctcccctcacaatcgactcactatgcttgttttgcacggtttgctggctaacagttcgggttgataaggacgttaaggacgaaggtgaagctgtgtggaactctcattgcgctgagaaatcccattttgaatttgctattcggagggcttgctttggttttgatgacggttttttcgtgccaatgtcatcgaatattccgaaggctccctggactttgcatggaaaatggacggaagtaaaggagggtgatgaagagttttacgtgcaaacgcaaagtgatgttgggctggaattcgttgttgatgatcaagaaaaccaggaggttatttgcactttatgtgcacgttggtttcctcgtggtatggatcaacagatcaataatcacatccgatcatatcgacatcttaaccactacctgcatgttaccaaccgcaatctgctctcgatgctaatggtacagaaaacggaggctgctagcagagaactgacgttggagtggctgaaacgctccgttcatcatgatacagacgaaatgagagtgtactcacctgaaatggcgttgcgaatgaagcactggggaaccgtgcctattcggaagattgatgctgctaattacgattccacccatcgtcctgtgttcgaatgtgtaatgaatgtagtggacaaggttgcagaagacggcgccgagcttatgcaaatacctgtcagagaggctttacttgctgctgcagtgaaaatacatgcaataaagcagcgaaacggaaatgtagagaggattctttgtcggtgcacgtttaccttcattttcatcggagcggtacagatccatacagaaagcaggctgaatcttgtcagccaagcgctgaacattcattgcggcaaatgcccccctccaaggattcgacgcaacggctccttgcgctacaaatctacgaaaaagtcatttttgtgcgaagccggtttctttaggatcatcttatgcctgcgtttcctacactttaagaaggtgaccgcaacgaatccgtcagcacgaaacaaattgtttccggatgtgtcctgcgttgttgatgatgcgtcatctcaaatgatttttacttga

SEQ ID NO: 350 - DNA, 2409 bp, Ancylostoma ceylanicum
atggttgcaaaagtaaaagaagagaagaacgcggaaacaacacgtagaacagacatatggcgctcaaacaacacttgtgtgatatgccaagatcattgcccttctcgtgaggataaagacaaacatgaaaaccaaacgaaacacaaaaagaagcttctcatttatgagttcttcgccaaagaggttccaaagttcggaccttttagtggaccatccgtgcttgtgaagaggtacacagcctgtggggaacaacttgttggtctggagtgtcttcatgaacttcatttctccttcagttctcaaccgtggtgggcctgttccatttgctatgaatcaggtgctcttatggaacaggcagacgtccatctgatgtcgatgagtcacattacaacctatttggatgaatttcattcctccaaaactgcgtcgttacaaatggatggagaccgcctcaaagtgtttgaggagatcaaacgtctttgcaatgaagtcctcgaggaacaaggaggtgaacttcttccgccggagtgcttagtcatggatgcaaatattactgagaaagaggccatggcgaagctggcagtggaagccgagcggacgaaaccatcatacagaatacatacagactgcacaaatgaggctcattcgcgaaaaatcctccagtgtttgatttgtcgccagctgattgcggttaatgatgaacttctcaaacggatctggagcactcacgaactttctccggcacatcgtcaggctgtggcaattaaccaattccttgaacaatttgatgttgaatatgtgttggatacggacgttcctgcaccaaaagctccgatcaagtggaagacagaaaatgagtgtaattatggtccaatatgcggtgtgaaattccttgtaacattcaaaaagcacaacttctgccatctgtgttcttgccgagtcgaatcaatagagcagcatttttctagcgaaagccatattattcagtttttgacgctatctaaccctgtggagatgttccatgtttctcgattttcacgtaagtctcgcatgaagaaagtgctggaaatggtctcgggtcccaagttccgtttcgagaatgagcaaagccgaagggttcatgctgactggtttccgaaagatatggaacatattctaaaaccagaatcgcacgaattcccaacattgatgcccccgctttctcccctcacaatcgactcactatgcttgttttgcacggtttgctggctaacagttcgggttgataaggacgttaaggacgaaggtgaagctgtgtggaactctcattgcgctgagaaatcccattttgaatttgctattcggagggcttgctttggttttgatgacggttttttcgtgccaatgtcatcgaatattccgaaggctccctggactttgcatggaaaatggacggaagtaaaggagggtgatgaagagttttacgtgcaaacgcaaagtgatgttgggctggaattcgttgttgatgatcaagaaaaccaggaggttatttgcactttatgtgcacgttggtttcctcgtggtatggatcaacagatcaataatcacatccgatcatatcgacatcttaaccactacctgcatgttaccaaccgcaatctgctctcgatgctaatggtacagaaaacggaggctgctagcagagaactgacgttggagtggctgaaacgctccgttcatcatgatacagacgaaatgagagtgtactcacctgaaatggcgttgcgaatgaagcactggggaaccgtgcctattcggaagattgatgctgctaattacgattccacccatcgtcctgtgttcgaatgtgtaatgaatgtagtggacaaggttgcagaagacggcgccgagcttatgcaaatacctgtcagagaggctttacttgctgctgcagtgaaaatacatgcaataaagcagcgaaacggaaatgtagagaggattctttgtcggtgcacggtatttcgacgcacgtcttctgggtctggtcgtgcggagttctcgttggtgaactcctaccaggtgcgtacggcagatctagatgatggtggagtcgctggtttacgctgtctaatcgtagtgaacagagatctgccgtacgcacctgaaagcaggctgaatcttgtcagccaagcgctgaacattcattgcggcaaatgcccccctccaaggattcgacgcaacggctccttgcgctacaaatctacgaaaaagtcatttttgtgcgaagccggtttctttaggatcatcttatgcctgcgtttcctacactttaagaaggtgaccgcaacgaatccgtcagcacgaaacaaattgtttccggatgtgtcctgcgttgttgatgatgcgtcatctcaaatgatttttacttga

SEQ ID NO: 351 - DNA, 1557 bp, Ancylostoma ceylanicum
atggctttctcgactccgatagagagtattgttaccaatatttgggatcgccatttagcctccgatcagcattttggaagaataagagcgttcatgtccactaaactagacatgcttggattctcagaaagcacttctacgtatactgtaaaaccgtttaatcaacaggacccatccaggaaggtgacatggcagtggaacgccaaggacagaacacacgagttcgtgctgaacgttattggcctggaagacctcgtagaacgacgaagcatcgcgggagtcgaggagaaggtggaggacttcttctgccgactgtgtgctgtgttgattcctcgcagatcagctgccctcgaagcccatgttcgctctgcacaacacgttttatgttatgtgcacaagtaccacccactcactatcatggagctcgattgcctgccaaaagaaggaggaaaagagatgcggaagattctagctcaactcttgaaagatcaccagttgaaggaacagtactgcatccctgtctacgatccggttggcgaacaggaacgaaaaacggtcgttgccgtgcagaaagcaaaggatgaagagcgacagcggcatttggcagaagcgcggcagaaggcgcaggagcagcgaaagaagaaggacgaagagcgcagaaagcagcgcgaacttgaaatggaaaaagagaaacaaagacaggaggagcgagcccgcagagaaaaagacgcgagggaacgtgctaagcgccttgaagaggaaaaagctcgtgtaaagaagcttttggtcgaagcagcgcgtaaggctgaagaagagaagaaagccaaagaagcgaaagagaaagctcaggaggaagctgaccgccaaaagcggcaagagcacctacggtcgcttctggaccgtgagaaggctcggctacgggctctccacgagaaggaagctgcccaacgtcgtctgctagtagagaagcaagaactagaaaagaaaatgaaagagctacaagaacgtgctgctctaaagaatcagcctccacaggttgcacagggtcaacatccactaagaaacggacctagttcctatgcaaacataccagagccgcagttgatagctccaaatatgagaccttcttcgactgggctggttaatgtgtcaccggaaccgtaccggcaaccgctgcttggacacgctccacagtttatgcacaatggaccacatcatccagtgccacctccatcaatgtcttacaatggtccaccttctatgggtcgagaagcattcgaaacagctggaccgaagccactgttcccgaagttcgtacctattgctgaacaagtgcccgtctacaagggactggaagatgcggagaaagctactcgtccgaagccgaagacaccaccacctgaagaaaggcctaaagtgattagccgcccgtcactgttcgacaggagagttgatccgtacatttcgaatgcgaagatcatccaaacaagagatcagctggtcgacttcagtgagttctatccctttcattatgacggtaaaacttgtttgacgtag

SEQ ID NO: 352 - DNA, 4290 bp, Ancylostoma ceylanicum
atggctttctcgactccgatagagagtattgttaccaatatttgggatcgccatttagcctccgatcagcattttggaagaataagagcgttcatgtccactaaactagacatgcttggattctcagaaagcacttctacgtatactgtaaaaccgtttaatcaacaggacccatccaggaaggtgacatggcagtggaacgccaaggacagaacacacgagttcgtgctgaacgttattggcctggaagacctcgtagaacgacgaagcatcgcgggagtcgaggagaaggtggaggacttcttctgccgactgtgtgctgtgttgattcctcgcagatcagctgccctcgaagcccatgttcgctctgcacaacacgttttatgttatgtgcacaagtaccacccactcactatcatggagctcgattgcctgccaaaagaaggaggaaaagagatgcggaagattctagctcaactcttgaaagatcaccagttgaaggaacagtactgcatccctgtctacgatccggttggcgaacaggaacgaaaaacggtcgttgccgtgcagaaagcaaaggatgaagagcgacagcggcatttggcagaagcgcggcagaaggcgcaggagcagcgaaagaagaaggacgaagagcgcagaaagcagcgcgaacttgaaatggaaaaagagaaacaaagacaggaggagcgagcccgcagagaaaaagacgcgagggaacgtgctaagcgccttgaagaggaaaaagctcgtgtaaagaagcttttggtcgaagcagcgcgtaaggctgaagaagagaagaaagccaaagaagcgaaagagaaagctcaggaggaagctgaccgccaaaagcggcaagagcacctacggtcgcttctggaccgtgagaaggctcggctacgggctctccacgagaaggaagctgcccaacgtcgtctgctagtagagaagcaagaactagaaaagaaaatgaaagagctacaagaacgtgctgctctaaagaatcagcctccacaggttgcacagggtcaacatccactaagaaacggacctagttcctatgcaaacataccagagccgcagttgatagctccaaatatgagaccttcttcgactgggctggttaatgtgtcaccggaaccgtaccggcaaccgctgcttggacacgctccacagtttatgcacaatggaccacatcatccagtgccacctccatcaatgtcttacaatggtccaccttctatgggtcgagaagcattcgaaacagctggaccgaagccactgttcccgaagttcgtacctattgctgaacaagtgcccgtctacaagggactggaagatgcggagaaagctactcgtccgaagccgaagacaccaccacctgaagaaaggcctaaagtgattagccgcccgtcactgttcgacaggagagttgatccgtacatttcgaatgcgaagatcatccaaacaagagatcagctggtcgacttcatttggagacagggagctgagcgcattccgcctagtgagttgccggtacagttcaatgaaaaagctgcaggaattgaaggtgctcttggagtggactgtttgtatgaggtggtctgcgcggactgttccgatctggacacgttatactgctctatgtgtggagtatggacatttccgaacgaaatgttcaagcatctggaaacagtcgagcacaaactagcgtatctgttccgaaactacaagatgtatcatcagacggttgtatcagaaacgaattccatcgtgagggaagctatgctttcgcagttcgcaatacagatatggaagatggaaaaacctcctggacaagtttgcaatcgccttagatctctgctcgatcgtgcgacaatcgaacgtatttggccagaatatgtgaacgttttggatcactcctggaaggacagcggcagaacagtcggtcgagtcgaggtgcctccgcctatttccaaagaagcttggtgtattcccacagatgataaagctgctgaagacaagaagatcaaagagaagaagatcaaggaggagataaaggacgagaaggaaaaaggaaatgagaaaagttcgaagacgaagggagagagccgcgataagagcgatagtcgttcaaaacgaaaggatgataaggaaaaggagaaagacaagaaggaaagctcgtccagcatccaatcgagaaagcggtcggcgtcccccgagaagaagtcctcgtcttcaagcaagccacatgagagcagaagatcagcatctcctcaccgaaagcggcgtcgatctcgaagtcccgataaagacagtcgcactcgaagtcccagtaagcgtagtagaagccggagccccgataaacgtagtcgtgcccgaagccctgaaaagcatagtagtcgcgatgataagcattcgcatgagcgcagcagtagtcgttcaaagcgcgacaggcgtcgtagttcttccagggagtatagtaggcgtagcaggagtcgttcacgttcacgcagtcctcgacacaggcgtaggcgcagcagaagtcgatcccgtgggcgtcgaagcgataacggtttgtcgtgggaagaaactgcagccgcattcctcgcgaaacttggcgatgcgcaggctgccgcgaaggtactggattcggccaaggagaagaagagctcaaaacgcgcttcatcgaagtcattcgtggacgagaagatcaagcagttgaggagtctggcgaatccaacaccgtcgtcgtcttcgaaggagaaagtggataccgagagagcaaagccgtcaagttcctcagattcagacgagaaagttcaaatgcgcaagctgctcggtgttctcataaccatgcagcaggaagccgaaagaaacggtaatctagacgaatcgataatcgacaagctttacagagaagtgggtctgaagaagtccgtagaagcgtcaagtgatcagctgctcgcccaaatctgctcgcaaatctcgcaggatagcccgtcgtcgagcaaacccgccatcgacttgcagtcttttggaatcagcacgcagccgcaaccagtgccgcaacaacctgctccctcgatatttggcggcggcttcaatacccagccaatgccaccacctgggcaaccgtctacgatacagtcactattgtctgaagtgaagcgatcacttggcaccctcaagccgccgcgcccgccttcaccactcgtcaaatcgcctcctttcgtgattaccaagcgagacgatgtgttcccagacgctgaaaccatctcctacgtgttccctggcgcagattcaaaggagataagacaagcttccagttcgaacacgccacctgcagaggacaaattatccaagaaggaaaaagcagcactgcgtaggaagatgttgttggaagaagcagaaagacttagaaggcaagctgaggaagaaggcgaggatgacgatgacgagtgggattgtctggccgaagtgatcaacaatcctcctcctacgaacaaggttaatactgtggagcagccttccgcaagatctcatcacaagtcgcaggaccaaaaaaccgctagccaggagaaatctcaggatcgacgatcagacgagaaggaaaagtctcatagccgaaagtccgacgacaaagggagatcacacgaccgaaggtcggacgacagagagaagtcacatgatcgaagagcttccgagaaagagaaagaggattccaagagagcgagcgattctaagagatccagcagtcaacgagaagaggaaccacgcgaaaagaagcttgatcctattgcacctgggcaaaagatgccgcttcagcgaactattctccctgatggaaaaccatccagggaggcgaaaaaagaagaagctaaggccagggcgaaagaaaagaaggaagagcgtgagaaaagtcaggtgaaaggagttccaagtcattggccacagccagtaccacagccgctgctgggattgtctttggaacggcctccacagaaagaagaacctcgacagccaatgcgacaggagcctttccagccgcatccacaacagttccccatgcataacgaacctgtgtatccaccaatgggtaataatcctgtttatcctaaccagtatcctcccatgtatccgaatcagcagcctccattccaaaacccaccgtattacccggggcaacagtttatgggtcagccaccaatgaacggttttggtggtccaccaatgcaacaacagttttacggtcaccccccgtattattag

SEQ ID NO: 353 - DNA, 2814 bp, Ancylostoma ceylanicum
atgaagcgtgttatgggcaaacctattgttatgttttggagacagggagctgagcgcattccgcctagtgagttgccggtacagttcaatgaaaaagctgcaggaattgaaggtgctcttggagtggactgtttgtatgaggtggtctgcgcggactgttccgatctggacacgttatactgctctatgtgtggagtatggacatttccgaacgaaatgttcaagcatctggaaacagtcgagcacaaactagcgtatctgttccgaaactacaagatgtatcatcagacggttgtatcagaaacgaattccatcgtgagggaagctatgctttcgcagttcgcaatacagatatggaagatggaaaaacctcctggacaagtttgcaatcgccttagatctctgctcgatcgtgcgacaatcgaacgtatttggccagaatatgtgaacgttttggatcactcctggaaggacagcggcagaacagtcggtcgagtcgaggtgcctccgcctatttccaaagaagcttggtgtattcccacagatgataaagctgctgaagacaagaagatcaaagagaagaagatcaaggaggagataaaggacgagaaggaaaaaggaaatgagaaaagttcgaagacgaagggagagagccgcgataagagcgatagtcgttcaaaacgaaaggatgataaggaaaaggagaaagacaagaaggaaagctcgtccagcatccaatcgagaaagcggtcggcgtcccccgagaagaagtcctcgtcttcaagcaagccacatgagagcagaagatcagcatctcctcaccgaaagcggcgtcgatctcgaagtcccgataaagacagtcgcactcgaagtcccagtaagcgtagtagaagccggagccccgataaacgtagtcgtgcccgaagccctgaaaagcatagtagtcgcgatgataagcattcgcatgagcgcagcagtagtcgttcaaagcgcgacaggcgtcgtagttcttccagggagtatagtaggcgtagcaggagtcgttcacgttcacgcagtcctcgacacaggcgtaggcgcagcagaagtcgatcccgtgggcgtcgaagcgataacggtttgtcgtgggaagaaactgcagccgcattcctcgcgaaacttggcgatgcgcaggctgccgcgaaggtactggattcggccaaggagaagaagagctcaaaacgcgcttcatcgaagtcattcgtggacgagaagatcaagcagttgaggagtctggcgaatccaacaccgtcgtcgtcttcgaaggagaaagtggataccgagagagcaaagccgtcaagttcctcagattcagacgagaaagttcaaatgcgcaagctgctcggtgttctcataaccatgcagcaggaagccgaaagaaacggtaatctagacgaatcgataatcgacaagctttacagagaagtgggtctgaagaagtccgtagaagcgtcaagtgatcagctgctcgcccaaatctgctcgcaaatctcgcaggatagcccgtcgtcgagcaaacccgccatcgacttgcagtcttttggaatcagcacgcagccgcaaccagtgccgcaacaacctgctccctcgatatttggcggcggcttcaatacccagccaatgccaccacctgggcaaccgtctacgatacagtcactattgtctgaagtgaagcgatcacttggcaccctcaagccgccgcgcccgccttcaccactcgtcaaatcgcctcctttcgtgattaccaagcgagacgatgtgttcccagacgctgaaaccatctcctacgtgttccctggcgcagattcaaaggagataagacaagcttccagttcgaacacgccacctgcagaggacaaattatccaagaaggaaaaagcagcactgcgtaggaagatgttgttggaagaagcagaaagacttagaaggcaagctgaggaagaaggcgaggatgacgatgacgagtgggattgtctggccgaagtgatcaacaatcctcctcctacgaacaaggttaatactgtggagcagccttccgcaagatctcatcacaagtcgcaggaccaaaaaaccgctagccaggagaaatctcaggatcgacgatcagacgagaaggaaaagtctcatagccgaaagtccgacgacaaagggagatcacacgaccgaaggtcggacgacagagagaagtcacatgatcgaagagcttccgagaaagagaaagaggattccaagagagcgagcgattctaagagatccagcagtcaacgagaagaggaaccacgcgaaaagaagcttgatcctattgcacctgggcaaaagatgccgcttcagcgaactattctccctgatggaaaaccatccagggaggcgaaaaaagaagaagctaaggccagggcgaaagaaaagaaggaagagcgtgagaaaagtcaggtgaaaggagttccaagtcattggccacagccagtaccacagccgctgctgggattgtctttggaacggcctccacagaaagaagaacctcgacagccaatgcgacaggagcctttccagccgcatccacaacagttccccatgcataacgaacctgtgtatccaccaatgggtaataatcctgtttatcctaaccagtatcctcccatgtatccgaatcagcagcctccattccaaaacccaccgtattacccggggcaacagtttatgggtcagccaccaatgaacggttttggtggtccaccaatgcaacaacagttttacggtcaccccccgtattattag

SEQ ID NO: 354 - DNA, 1752 bp, Ancylostoma ceylanicum
atggtggatcattcgacagtctcacttggcctggttaaccagtgtatgctaatgcgtgcagttcaacacctccttcgaaacaattcaattacaatctcaatctttcgcacaaaagtgtggacatctcgtctgcctctcgtcgctctttccgacgttccactgcatgaaaaagtgatcgaagcaatgcgcgtccacgccgagaatccaacgaagatagcattggtgagcggtgacgggaacttcgataaactcacttacaaaaagctcttgtatcaaacagaggcagccgcgtctttcttatcaaaaggcggcttcggacgggaagatgtggcttgcctcgtgctgtcaaactcatccgcttttatctcctctcacctggctgtgttgaaatgtggaggcatcgttaccactgcagacataaccactccacaaggtgatctagaacatcaaatacgcaacaccagtacaagcattatatttactgaagaagagatcctgaacaaggtcttgcaagtatctaataattgtcgcaatgttaaggctattttctgtgtgagatctagttcagcaacagaaaaactgcctgatggtgtgatcgatttcaagagcgtaattgcagggcctacaggtcaagtgaagaacgatgagtatgaaccaaacaatttagcggcagttccttatacaatcagtccaaataaaatcccagcaggaatgatgctctctcatcagaacatttcgaccgcgttcaatatctacgaagggtgtctgcgtcgcatgatgaagaaagcattcacgtgtttcgacccctctcaggagaagctacttcattgttcctctttcgcaaacattttcggtctgctctgcatagacatcgcactatttatgggattcacatcagtgatcttgaagaaattcgatacgacactgttcatgaacagcttacactcgtacagacctcgtcttctcatcactgagccaaagaatgttgtcgcagccctgaagcaatccgctacagagcggttcaagacgaactctttggaatacgtgctttgcagtggaccagttgttggcagacgtgttcgccaatcgttcctcaacaaatttccttctgtaaaatacatgactaacggggcaggattgctgagtggagctccaggagcaatgatacccaacatgggtgaacgggaaaatattaataacagtggatgtgcagtagccacgtgtgacgttaaggtagtttgtgcaggcaaagcgctaaaagacgatgaaattggagagatctgcttacgtggcccaaccgtcatgcaaggttacgttgacgattgtgagagcatcgacgctgatggttggtaccacacgggagaagtggggcatgttgataaacatggtaatattttcattgctggtagcctcgatgatttcattgatgtgaatggtaatcagatttgcctaaatgaagtggaagacgtgctattgtgtcatccatccatcgcagatgcagttgtagtaggaatagaagacgaggaatctgcacaaagagcgaaagcttatgttgtgcactgtgacgaaacgttgaccaacgacgatgtcaagctttacattcaaggacagctaccttacaatgatctcaacattggagtagaatttgtcagcatgattccaagaggagctgatggtcgtgtactgcgccatgaacttttgaaggatgaaataccacaagagcagcagatagtagctacggaatcagaataa

SEQ ID NO: 355 - DNA, 2136 bp, Ancylostoma ceylanicum
atggtggatcattcgacagtctcacttggcctggttaaccagtgtatgctaatgcgtgcagttcaacacctccttcgaaacaattcaattacaatctcaatctttcgcacaaaagtgtggacatctcgtctgcctctcgtcgctctttccgacgttccactgcatgaaaaagtgatcgaagcaatgcgcgtccacgccgagaatccaacgaagatagcattggccatgaaaacaaaggacccacttattctgattaaggcatacaagacatatgtccgtccaattgtggaatgcggtacaacggtgttttctcctcacagacaaaaagatataaatcttcttgaaagtgtccagaataacttcacgcgtaaactggcaatgcgctgtggcaacctaatgtactctcaaatttcgaatgccattaatagacgcaaagagtacaggctccaaagtttacacaacagaagaaagattaacgaccttgtgatggcattcaaaatcataacaggcaaatgtggcatcgagtctgctcctttctttactcttgcaccatcaagaactagaggcgggggtatgaaaataagaatccctgttgccagaacacaggtgagcggtgacgggaacttcgataaactcacttacaaaaagctcttgtatcaaacagaggcagccgcgtctttcttatcaaaaggcggcttcggacgggaagatgtggcttgcctcgtgctgtcaaactcatccgcttttatctcctctcacctggctgtgttgaaatgtggaggcatcgttaccactgcagacataaccactccacaaggtgatctagaacatcaaatacgcaacaccagtacaagcattatatttactgaagaagagatcctgaacaaggtcttgcaagtatctaataattgtcgcaatgttaaggctattttctgtgtgagatctagttcagcaacagaaaaactgcctgatggtgtgatcgatttcaagagcgtaattgcagggcctacaggtcaagtgaagaacgatgagtatgaaccaaacaatttagcggcagttccttatacaatcagtccaaataaaatcccagcaggaatgatgctctctcatcagaacatttcgaccgcgttcaatatctacgaagggtgtctgcgtcgcatgatgaagaaagcattcacgtgtttcgacccctctcaggagaagctacttcattgttcctctttcgcaaacattttcggtctgctctgcatagacatcgcactatttatgggattcacatcagtgatcttgaagaaattcgatacgacactgttcatgaacagcttacactcgtacagacctcgtcttctcatcactgagccaaagaatgttgtcgcagccctgaagcaatccgctacagagcggttcaagacgaactctttggaatacgtgctttgcagtggaccagttgttggcagacgtgttcgccaatcgttcctcaacaaatttccttctgtaaaatacatgactaacggggcaggattgctgagtggagctccaggagcaatgatacccaacatgggtgaacgggaaaatattaataacagtggatgtgcagtagccacgtgtgacgttaaggtagtttgtgcaggcaaagcgctaaaagacgatgaaattggagagatctgcttacgtggcccaaccgtcatgcaaggttacgttgacgattgtgagagcatcgacgctgatggttggtaccacacgggagaagtggggcatgttgataaacatggtaatattttcattgctggtagcctcgatgatttcattgatgtgaatggtaatcagatttgcctaaatgaagtggaagacgtgctattgtgtcatccatccatcgcagatgcagttgtagtaggaatagaagacgaggaatctgcacaaagagcgaaagcttatgttgtgcactgtgacgaaacgttgaccaacgacgatgtcaagctttacattcaaggacagctaccttacaatgatctcaacattggagtagaatttgtcagcatgattccaagaggagctgatggtcgtgtactgcgccatgaacttttgaaggatgaaataccacaagagcagcagatagtagctacggaatcagaataa

SEQ ID NO: 356 - DNA, 1911 bp, Ancylostoma ceylanicum
atgttacttgttattttttacaaaaattgtttattgtttttgttggtcccattatttgttgtcggatttttttctcatcattattgttatctgttaataagaactgaagtgattgccgaagtggactgttcattacgagtggtcagtccaactctagaagaagctgtcgcaaatccgacaagtgacagtatatgtctcttcatctcttctacctggaaagcacgactattcgaaatgaaatctactcgtatactttctcgtctagcaaatcgcaaagcgctactcaacctgtcaaagaatctctgcgcttcgacatcgaatggaactacatcatcaacaatccctttgtcgcattggtcccttcaagtcaggacattagcgagcttcaaagtgaatctcaaggctccagacgtgaatccatctagtgtccagcatagcgccgatgttggtccaagcaacgtgctgacttcggaattcggggaagtcccagtgtgcacaactccattccacaagaaaatcctggcaaagatactagatcacgcagcagcacatcccagtcgagcggccctgattatggccgaaaacccatccagaaatatcaaatacctggaactgcacaggcaaacgtatgctttcgcaagcttccttacccacagaggcgtccagcatatggatgtggtctgtagcgtgctgccaaactgtatagaattcgtgcctacatatctagggacaatgatggctggagctgttagcatggccgcggacgagacctgcactgaagaggagcttgcaaatgctttccgggtcagccagtgcaaggtggtcatcacatatttcaaggctttgaagagggtaatggcagctgcgaaatgctgttcgtcaattgaggctatcgtttgtgtaacagcatcaaaccacgaagtgattccagaatgcattgttgcatggaaagacaccgtgaactcatctacagccgactgcggcaatttcaactacagtccgaatgactctgcgtttgtacagtatcacagcaaggtgcctgcgtcgcagaatggaatagtgatgtcgcacaggaatatctccacgatgcttgatatcaacacagagtacttcactaaacaagtctacaagcgaatgttctacgacaacaaggaaggtgtctatgaaccatacgaggagcacgcgattctcacaatgccattccatcatatctttggattcgcacacctaaacaggattcttctcgaggggagtacgggagttattatgacaaatgtcgaaccgaagcattatctggagacgctacacaagtacaggccaaaagtcgttactgtgctaccagagatggccaatttcctcattcaccactcattggtgaagaactacgacttaacgtctcttgaagtggtactaattggtggtgcaccgttcacgggaaaactcatggacgatttcctggccaaatttaagcacgtgcggttcatgataccattttatggatggccggagtgtggatttggcttcatgtcgcccatgaaacgtcgacgcggcacggctacaatcctcccaacgttccagcaaaaggtcgtctgcctacaaactggccaggcgcttccattcgacagcgagggagagatctgcctgcgcagcaacacattgatgcagggctatatgagcagtcgtgaagagacatctaaagtgatcgacgctgaaggctggttccatacaggagacgtcggaatactggatagtgctggcgaaactttgattgtggatcgatccaaagtaattccacgttttcttctattcagatttctattcaatgtttcctattttgaggtggcgtctgctcaagagaacggaggaaatagagcagaaacgagcgcagagaagagtcaaaggggactctaa

SEQ ID NO: 357 - DNA, 1929 bp, Ancylostoma ceylanicum
atgttacttgttattttttacaaaaattgtttattgtttttgttggtcccattatttgttgtcggatttttttctcatcattattgttatctgttaataagaactgaagtgattgccgaagtggactgtgggttttattttactagttcattacgagtggtcagtccaactctagaagaagctgtcgcaaatccgacaagtgacagtatatgtctcttcatctcttctacctggaaagcacgactattcgaaatgaaatctactcgtatactttctcgtctagcaaatcgcaaagcgctactcaacctgtcaaagaatctctgcgcttcgacatcgaatggaactacatcatcaacaatccctttgtcgcattggtcccttcaagtcaggacattagcgagcttcaaagtgaatctcaaggctccagacgtgaatccatctagtgtccagcatagcgccgatgttggtccaagcaacgtgctgacttcggaattcggggaagtcccagtgtgcacaactccattccacaagaaaatcctggcaaagatactagatcacgcagcagcacatcccagtcgagcggccctgattatggccgaaaacccatccagaaatatcaaatacctggaactgcacaggcaaacgtatgctttcgcaagcttccttacccacagaggcgtccagcatatggatgtggtctgtagcgtgctgccaaactgtatagaattcgtgcctacatatctagggacaatgatggctggagctgttagcatggccgcggacgagacctgcactgaagaggagcttgcaaatgctttccgggtcagccagtgcaaggtggtcatcacatatttcaaggctttgaagagggtaatggcagctgcgaaatgctgttcgtcaattgaggctatcgtttgtgtaacagcatcaaaccacgaagtgattccagaatgcattgttgcatggaaagacaccgtgaactcatctacagccgactgcggcaatttcaactacagtccgaatgactctgcgtttgtacagtatcacagcaaggtgcctgcgtcgcagaatggaatagtgatgtcgcacaggaatatctccacgatgcttgatatcaacacagagtacttcactaaacaagtctacaagcgaatgttctacgacaacaaggaaggtgtctatgaaccatacgaggagcacgcgattctcacaatgccattccatcatatctttggattcgcacacctaaacaggattcttctcgaggggagtacgggagttattatgacaaatgtcgaaccgaagcattatctggagacgctacacaagtacaggccaaaagtcgttactgtgctaccagagatggccaatttcctcattcaccactcattggtgaagaactacgacttaacgtctcttgaagtggtactaattggtggtgcaccgttcacgggaaaactcatggacgatttcctggccaaatttaagcacgtgcggttcatgataccattttatggatggccggagtgtggatttggcttcatgtcgcccatgaaacgtcgacgcggcacggctacaatcctcccaacgttccagcaaaaggtcgtctgcctacaaactggccaggcgcttccattcgacagcgagggagagatctgcctgcgcagcaacacattgatgcagggctatatgagcagtcgtgaagagacatctaaagtgatcgacgctgaaggctggttccatacaggagacgtcggaatactggatagtgctggcgaaactttgattgtggatcgatccaaagtaattccacgttttcttctattcagatttctattcaatgtttcctattttgaggtggcgtctgctcaagagaacggaggaaatagagcagaaacgagcgcagagaagagtcaaaggggactctaa

SEQ ID NO: 358 - DNA, 1656 bp, Ancylostoma ceylanicum
atggtactaaagtcaccgagtgccgaagtgcccgtgtgtgatacaccgctccacgagaaggtgctagctgctgtcttgaggaatatcgacaggaatccggatcgaatcgcatttatcagtgctgaggacccatcggccagcatcaccttcaaggaggtctatggccaagcacacagtgttgcaaacttcctttctaaaagaggccatggacacttagatgtgtgttgccaagtgatgcagaactgcatcgaatatgctgtgttctaccttggagcgctgctttgcggtggagcgatctctggcgtcagtgctatgttcaccacctacgaattagaacgacagttcgtcgactcccactgcaaagtggtcatcaccgatgaagcccacctgaacaaggttcttttggctactaaaagatgtccagaagtaaagaccatcatctgcattcgatcaccgggatcaactcatgcgctgccaccggctgttgtgtcttgggatgacgtcatcaagacacctgtatcagcactgcccaagtacaattacagccccgatgacatggcgttgctgccgtattcaagcggcaccacaggctctcccaaaggtgtagtcctaacccacagaaatttcacaaccatgttggatatagttaacagtcatttcgacaaccacatcgtaagcaaacttggcgattcggattgggactaccacaatgagaatctgctattgatgctacccttctaccacatttatggctttggactgatgaaccaaacgcttatcacaggcacaactgggatagttttcgctaaattcgatcctacggtgttcctgaatgcaatccagacatataaaccaaaaatgctcatgctcgtcccacccatcctactgctgttgacgaagcacccaatgacgtccaattacgatctatcctcactgcagttcgtcctgactggggcagcacctgctgggaaagatctttgtgacgagtttctcaacaaatacaaacatgttcgatatttggcacaagcatatggtatgacggaatgtggtatggcctctcatcttccgccgctggattcccgttccaatttcttaactgttggcactctcatttctacattcgagcaaaagataatctccacaagcactggaaacgaagttcccattggcgagaggggagagatctgtgttcgtagtcccacaatcatgaaagggtacctgaaccgtcctgaagcaactgcggagatgatcgattcggaaggatggttacatacaggtgacattggattcgttgatgagaaaggccagactttcattgttgatcggctgaaagaactaatcaaagtgaaggggttgcaggttgccccagccgaactggaagacatccttttgtcccacaaagaaatccatgacgcagcggttatcggagtaccagacgagaaaactggagagaaaccgcgagcgtacgtcgtcagtgccagtaagaacttgacggaagccgatgtgaagcgttttgtagaagagaaagtatccacgtacaaattcctcaccggcggtgttgttttcgtcaaagagatccccaaatcaccatctgggaaaattcttcggcgattcttacgagatcgagctgcagctgagctggtatcgaaattatag

SEQ ID NO: 359 - DNA, 1179 bp, Ancylostoma ceylanicum
atgactgagcacctcagctccactcttctcatcccgactgcagtaggctccagtgttgctacgggtcagcagtactcagtggaatacctgtcgcagttgctcaaggacaagaagcaactttccgcttttccaaatgtcttccatcacttggagcgactcgccgatgaagaaatcagcaaagtccgagtggcgctattccagttcgagttcacgaaagaggagatgagccttccagaaccggaaggagatgtccaaatcacaacggaaaaagtgttcgttcctgcaaaagagcatcccgattacaatttcgttggacgaatattgggaccacgaggaatgacagcgaagcagttagagcaagaaacgggttgcaaaataatggtacgagggcgagggtcaatgcgtgataaaaagaaggaagaattaaatcggggcaagccgaattgggaacatctatctgaagatctgcatgtgttgatccaatgcgaagacacgcctaatcgagctcggatcaaactggcgagggctgttgatgaagtcaagaaactgttggtgccagctcctgaaggtgaagacgagctgaagcgcaagcagcttatggagttggctatcatcaacggaacttaccgctccgcgactgaacaagctgctgcggctgcagcagcagcacagctgaagcaaccactggcagcggcccttcaggccgccgctctctctgcccaagctcgaagtgttctgccgatgttggccgcaaataatccagcgttggctcgatcaccaaccatggcggtggcaggtgctccaattgtgatgagtcctggccgaggtgctgctgggcagcagagtcagatgctgggtctgcagacgcaactaaacgcagccgtcgtcagcagcaatgctgccgctgtcgcagcgcaacaagctgcgatattgcaacaacagcaacaacaggctgctgagtaccaacagctgttgctcagccagggtttatcctatgagaacttggcgaacgtcgctgccttgcagcagttccagcaagcccaagcccaagctcaacaacaagcggccgcccaacagcagtatggtctgcttgggggacagtactcagattacgccggtgtagacatagctgctgctcaaactgctcccggtgggtttctcgttcggaagtgggcctga

SEQ ID NO: 360 - DNA, 1224 bp, Ancylostoma ceylanicum
atgctgtgcccagttggggtcacgtcgccagtccagctaacttccatgactgagcacctcagctccactcttctcatcccgactgcagtaggctccagtgttgctacgggtcagcagtactcagtggaatacctgtcgcagttgctcaaggacaagaagcaactttccgcttttccaaatgtcttccatcacttggagcgactcgccgatgaagaaatcagcaaagtccgagtggcgctattccagttcgagttcacgaaagaggagatgagccttccagaaccggaaggagatgtccaaatcacaacggaaaaagtgttcgttcctgcaaaagagcatcccgattacaatttcgttggacgaatattgggaccacgaggaatgacagcgaagcagttagagcaagaaacgggttgcaaaataatggtacgagggcgagggtcaatgcgtgataaaaagaaggaagaattaaatcggggcaagccgaattgggaacatctatctgaagatctgcatgtgttgatccaatgcgaagacacgcctaatcgagctcggatcaaactggcgagggctgttgatgaagtcaagaaactgttggtgccagctcctgaaggtgaagacgagctgaagcgcaagcagcttatggagttggctatcatcaacggaacttaccgctccgcgactgaacaagctgctgcggctgcagcagcagcacagctgaagcaaccactggcagcggcccttcaggccgccgctctctctgcccaagctcgaagtgttctgccgatgttggccgcaaataatccagcgttggctcgatcaccaaccatggcggtggcaggtgctccaattgtgatgagtcctggccgaggtgctgctgggcagcagagtcagatgctgggtctgcagacgcaactaaacgcagccgtcgtcagcagcaatgctgccgctgtcgcagcgcaacaagctgcgatattgcaacaacagcaacaacaggctgctgagtaccaacagctgttgctcagccagggtttatcctatgagaacttggcgaacgtcgctgccttgcagcagttccagcaagcccaagcccaagctcaacaacaagcggccgcccaacagcagtatggtctgcttgggggacagtactcagattacgccggtgtagacatagctgctgctcaaactgctcccggtgggtttctcgttcggaagtgggcctga

SEQ ID NO: 361 - DNA, 1212 bp, Ancylostoma ceylanicum
atgactgagcacctcagctccactcttctcatcccgactgcagtaggctccagtgttgctacgggtcagcagtactcagtggaatacctgtcgcagttgctcaaggacaagaagcaactttccgcttttccaaatgtcttccatcacttggagcgactcgccgatgaagaaatcagcaaagtccgagtggcgctattccagttcgagttcacgaaagaggagatgagccttccagaaccggaaggagatgtccaaatcacaacggaaaaagtgttcgttcctgcaaaagagcatcccgattacaatttcgttggacgaatattgggaccacgaggaatgacagcgaagcagttagagcaagaaacgggttgcaaaataatggtacgagggcgagggtcaatgcgtgataaaaagaaggaagaattaaatcggggcaagccgaattgggaacatctatctgaagatctgcatgtgttgatccaatgcgaagacacgcctaatcgagctcggatcaaactggcgagggctgttgatgaagtcaagaaactgttggtgccagctcctgaaggtgaagacgagctgaagcgcaagcagcttatggagttggctatcatcaacggaacttaccgctccgcgactgaacaagctgctgcggctgcagcagcagcacagctgaagcaaccactggcagcggcccttcaggccgccgctctctctgcccaagctcgaagtgttctgccgatgttggccgcaaataatccagcgttggctcgatcaccaaccatggcggtggcaggtgctccaattgtgatgagtcctggccgaggtgctgctgggcagcagagtcagatgctgggtctgcagacgcaactaaacgcagccgtcgtcagcagcaatgctgccgctgtcgcagcgcaacaagctgcgatattgcaacaacagcaacaacaggctgctgagtaccaacagctgttgctcagccagggtttatcctatgagaacttggcgaacgtcgctgccttgcagcagttccagcaagcccaagcccaagctcaacaacaagcggccgcccaacagcagtatggtctgcttgggggacagtactcagattacgccggtgtagacatagctgctgctcaaactgctcccggtgccatgattaaccaacgtcgtgtcctcggcacttctcgtgaccacccctacaagcagtag

SEQ ID NO: 362 - DNA, 1257 bp, Ancylostoma ceylanicum
atgctgtgcccagttggggtcacgtcgccagtccagctaacttccatgactgagcacctcagctccactcttctcatcccgactgcagtaggctccagtgttgctacgggtcagcagtactcagtggaatacctgtcgcagttgctcaaggacaagaagcaactttccgcttttccaaatgtcttccatcacttggagcgactcgccgatgaagaaatcagcaaagtccgagtggcgctattccagttcgagttcacgaaagaggagatgagccttccagaaccggaaggagatgtccaaatcacaacggaaaaagtgttcgttcctgcaaaagagcatcccgattacaatttcgttggacgaatattgggaccacgaggaatgacagcgaagcagttagagcaagaaacgggttgcaaaataatggtacgagggcgagggtcaatgcgtgataaaaagaaggaagaattaaatcggggcaagccgaattgggaacatctatctgaagatctgcatgtgttgatccaatgcgaagacacgcctaatcgagctcggatcaaactggcgagggctgttgatgaagtcaagaaactgttggtgccagctcctgaaggtgaagacgagctgaagcgcaagcagcttatggagttggctatcatcaacggaacttaccgctccgcgactgaacaagctgctgcggctgcagcagcagcacagctgaagcaaccactggcagcggcccttcaggccgccgctctctctgcccaagctcgaagtgttctgccgatgttggccgcaaataatccagcgttggctcgatcaccaaccatggcggtggcaggtgctccaattgtgatgagtcctggccgaggtgctgctgggcagcagagtcagatgctgggtctgcagacgcaactaaacgcagccgtcgtcagcagcaatgctgccgctgtcgcagcgcaacaagctgcgatattgcaacaacagcaacaacaggctgctgagtaccaacagctgttgctcagccagggtttatcctatgagaacttggcgaacgtcgctgccttgcagcagttccagcaagcccaagcccaagctcaacaacaagcggccgcccaacagcagtatggtctgcttgggggacagtactcagattacgccggtgtagacatagctgctgctcaaactgctcccggtgccatgattaaccaacgtcgtgtcctcggcacttctcgtgaccacccctacaagcagtag

SEQ ID NO: 363 - DNA, 2073 bp, Ancylostoma ceylanicum
atggcccagcctgcaccaccactaaatttatctgctatgcagatagtccagatccatcactatgcggcaaagatgaactcatccgaggtggataaactttaccaggatgacgcagtgtggattatcacgagcagcttcatcatatttacgatgcattcaggtttcggtctgctcgaatccgggagtgtgtcggccaaggatgaggtgaacatcatggtgaagaacgttgtcgacgtggtgttcggtggcttgtcctattggagcgtcggatacgggctcagctacggagactacgagccgttcaggaacagtttcgtcggatttgggcggtttttctacgacccgaccagggatcagacgactgtcaatgaggagggatggtcttacgcagcgtttctcttccaactcagcttggctacaacggcttccacaattgtgtctggagctgtagccgagcgagcgaagttgaaatcctacattctactcgggtgtctagtcattttaatacaggcgctaccggctcattgggtctgggacagcgaaggattcttctacaaactaggagtggtcgactttgctggatgttccgctgtccacatggttggtggtattatcggcttgatcgcgacagtttatctcaaaccgagaaggaatcgcttcaacgaggatagcgttcatcagatgagctcacccacgaacgctctgctaggaacattccttctctggtggggatggttcggcatcaatgctggatccgtttggggaatcacaagtggaagatggagacttggtgccagggcagctgttgcaacaatcatgagctctattggaggtggtgctacatcgatagtgatcagttttgtaaaaacgaagaaactacaagtgaacttcttaattaacggcatactatcgtccattgtgtcgatcacagcgttgtgtgctgtatcgcgtccttggcatgctctgatcattggcggcgtctcatcggcgttctcaatctcagttctgccactgctcgaccgcttcaaagtggacgatcctgttggtattgtgcctatacatcttacgtcttccatatggggtatgacagctgttgggattttctgcgagaaggatcgatatctgtctggagctacgaacggtcttgccggtgtgctgtattcagggcatttcacgctactgggtgttcaactgctgtgcacactaaccattctggtgtacagtgccacatttggcttgcttgtgctcgtcctgataagcaagagcccacttggattgagggttactgattacgaggaacagattggtgctgacgtgatcgaacatggtctggcaggaacaaacgtggctagatatgtcctggaaaagccgctaagcaccagaactttccaaactgtaacgaaggccataacaaaatggaaaatgttggctaaaacgaagagcagatcgaagaggatggaacaggcacgacagaagcgactcaccgaggagcaggcattagcagccaccactactggcaatggagcaaatggaactgccattgccggcaacggtgtcctgttgcaacatcggcgggtttcacggccttctcgggcaggaagtctgcagtcgccacggccgttgcagtcacctcggccaaatggcattaggccgcaggctgatgtcgaagcacaagtgcatgaggagtgctctaagccatcttcgcacaggtccacggtgtcagcccaagcagacgagtcctcgcaggcagaatcagctgagagcaagggagcagcaccagcctcgtcccggaacggcgactcgcccgacgatcgccgcagctcacagccgtcaagctcttcaacaagcctgacgcgtgttgatccacgaccatccacgacgaatcggcctgtcaccgccagtaccatcgccatgactgtcaatccagctcggccgacaattggaaaatttgtgcgatcaccgcaagctcgaccgctgacacccccagatgacgttagcatggacggagatggagacgaaccagccgcctccgctccagcacctggcaaaaacaacaaagtcgccccagaataa

SEQ ID NO: 364 - DNA, 2037 bp, Ancylostoma ceylanicum
atgcagatagtccagatccatcactatgcggcaaagatgaactcatccgaggtggataaactttaccaggatgacgcagtgtggattatcacgagcagcttcatcatatttacgatgcattcaggtttcggtctgctcgaatccgggagtgtgtcggccaaggatgaggtgaacatcatggtgaagaacgttgtcgacgtggtgttcggtggcttgtcctattggagcgtcggatacgggctcagctacggagactacgagccgttcaggaacagtttcgtcggatttgggcggtttttctacgacccgaccagggatcagacgactgtcaatgaggagggatggtcttacgcagcgtttctcttccaactcagcttggctacaacggcttccacaattgtgtctggagctgtagccgagcgagcgaagttgaaatcctacattctactcgggtgtctagtcattttaatacaggcgctaccggctcattgggtctgggacagcgaaggattcttctacaaactaggagtggtcgactttgctggatgttccgctgtccacatggttggtggtattatcggcttgatcgcgacagtttatctcaaaccgagaaggaatcgcttcaacgaggatagcgttcatcagatgagctcacccacgaacgctctgctaggaacattccttctctggtggggatggttcggcatcaatgctggatccgtttggggaatcacaagtggaagatggagacttggtgccagggcagctgttgcaacaatcatgagctctattggaggtggtgctacatcgatagtgatcagttttgtaaaaacgaagaaactacaagtgaacttcttaattaacggcatactatcgtccattgtgtcgatcacagcgttgtgtgctgtatcgcgtccttggcatgctctgatcattggcggcgtctcatcggcgttctcaatctcagttctgccactgctcgaccgcttcaaagtggacgatcctgttggtattgtgcctatacatcttacgtcttccatatggggtatgacagctgttgggattttctgcgagaaggatcgatatctgtctggagctacgaacggtcttgccggtgtgctgtattcagggcatttcacgctactgggtgttcaactgctgtgcacactaaccattctggtgtacagtgccacatttggcttgcttgtgctcgtcctgataagcaagagcccacttggattgagggttactgattacgaggaacagattggtgctgacgtgatcgaacatggtctggcaggaacaaacgtggctagatatgtcctggaaaagccgctaagcaccagaactttccaaactgtaacgaaggccataacaaaatggaaaatgttggctaaaacgaagagcagatcgaagaggatggaacaggcacgacagaagcgactcaccgaggagcaggcattagcagccaccactactggcaatggagcaaatggaactgccattgccggcaacggtgtcctgttgcaacatcggcgggtttcacggccttctcgggcaggaagtctgcagtcgccacggccgttgcagtcacctcggccaaatggcattaggccgcaggctgatgtcgaagcacaagtgcatgaggagtgctctaagccatcttcgcacaggtccacggtgtcagcccaagcagacgagtcctcgcaggcagaatcagctgagagcaagggagcagcaccagcctcgtcccggaacggcgactcgcccgacgatcgccgcagctcacagccgtcaagctcttcaacaagcctgacgcgtgttgatccacgaccatccacgacgaatcggcctgtcaccgccagtaccatcgccatgactgtcaatccagctcggccgacaattggaaaatttgtgcgatcaccgcaagctcgaccgctgacacccccagatgacgttagcatggacggagatggagacgaaccagccgcctccgctccagcacctggcaaaaacaacaaagtcgccccagaataa

SEQ ID NO: 365 - DNA, 888 bp, Ancylostoma ceylanicum
atgtaccgatttatggtggactgcatgaagtccgtaggggtggtggaatcgcacgccggacagctggccgacgtgctcatcgaggcagacgtccgcggtcactacagtcatggactgaatcgactggatatgtacataaaagattgccagaagaaggtgtgtaagacagatggagttccaaaaatattgaaggagcgagcgggtactgcgtgggtggatggtctcagtcttcttggccctgtcgtcggcaacttctgcatggatctggccgtcaaaaaagcaaaagaaacgggtgttggatgggtgtgtgcgaaaggctcaaatcactacggaatcgcgggttggtacgtgatgagagcgatgaaagaaggtgttatggcgatgtcattcaccaacacgtctccaatccaatatccaaccagggcgtcagtaccagcacttggtacgaaccctatggccataggcgtcaacggtaccggcgacgaccactttcttctcgatatggcaacgacaacggtggctattggaaaggttgaaatagcaaagcgacgaggagagtcggtgccagaaacatggggtgttgagaaaggtggaaagctcagcacaaatcccgagacaattttgggcggtggtggccttttcccactaggaggatcagaagttacagcagaatggatacaaactagtgggaccgggtatgtatacccactgtgcttcccttcccacggtcaaatatattggatacggctccaggactgcactctactagtgggatttaggcggctacaaaggctatggcctcggcgcgatggtggaaatcttctgcggaatcctaagcggtgcacactggggtccgcacatccgcaagtggatgtcggcgacaactga

SEQ ID NO: 366 - DNA, 924 bp, Ancylostoma ceylanicum
atgtaccgatttatggtggactgcatgaagtccgtaggggtggtggaatcgcacgccggacagctggccgacgtgctcatcgaggcagacgtccgcggtcactacagtcatggactgaatcgactggatatgtacataaaagattgccagaagaaggtgtgtaagacagatggagttccaaaaatattgaaggagcgagcgggtactgcgtgggtggatggtctcagtcttcttggccctgtcgtcggcaacttctgcatggatctggccgtcaaaaaagcaaaagaaacgggtgttggatgggtgtgtgcgaaaggctcaaatcactacggaatcgcgggttggtacgtgatgagagcgatgaaagaaggtgttatggcgatgtcattcaccaacacgtctccaatccaatatccaaccagggcgtcagtaccagcacttggtacgaaccctatggccataggcgtcaacggtaccggcgacgaccactttcttctcgatatggcaacgacaacggtggctattggaaaggttgaaatagcaaagcgacgaggagagtcggtgccagaaacatggggtgttgagaaaggtggaaagctcagcacaaatcccgagacaattttgggcggtggtggccttttcccactaggaggatcagaagttacagaaatgaacacgtggacgaatgagttatattggatagcagaatggatacaaactagtgggaccgggtatgtatacccactgtgcttcccttcccacggtcaaatatattggatacggctccaggactgcactctactagtgggatttaggcggctacaaaggctatggcctcggcgcgatggtggaaatcttctgcggaatcctaagcggtgcacactggggtccgcacatccgcaagtggatgtcggcgacaactga

SEQ ID NO: 367 - DNA, 282 bp, Ancylostoma ceylanicum
atgacatggtattttcagggacaatgcttcattgctgttgatcctgaagcgttcgctcctggattccatgagagaatgcaagaattcatcaacaccatgaggaatcttccggcttttgatgacaaattacgggtagaagtagcgggtgacgcagagaggaaacacgtgaagctggtccaggatatcggtggtattaactaccatccaaatcagataaaaaatgccgatgaacttgcggcgtcgctcaatgtgaagaagttgacagtgctcaaggaatactaa

SEQ ID NO: 368 - DNA, 1050 bp, Ancylostoma ceylanicum
atgtaccgatttatggtggactgcatgaagtccgtaggggtggtggaatcgcacgccggacagctggccgacgtgctcatcgaggcagacgtccgcggtcactacagtcatggactgaatcgactggatatgtacataaaagattgccagaagaaggtgtgtaagacagatggagttccaaaaatattgaaggagcgagcgggtactgcgtgggtggatggtctcagtcttcttggccctgtcgtcggcaacttctgcatggatctggccgtcaaaaaagcaaaagaaacgggtgttggatgggtgtgtgcgaaaggctcaaatcactacggaatcgcgggttggtacgtgatgagagcgatgaaagaaggtgttatggcgatgtcattcaccaacacgtctccaatccaatatccaaccagggcgtcagtaccagcacttggtacgaaccctatggccataggcgtcaacggtaccggcgacgaccactttcttctcgatatggcaacgacaacggtggctattggaaaggttgaaatagcaaagcgacgaggagagtcggtgccagaaacatggggtgttgagaaaggtggaaagctcagcacaaatcccgagacaattttgggcggtggtggccttttcccactaggaggatcagaagttacaggcggctacaaaggctatggcctcggcgcgatggtggaaatcttctgcggaatcctaagcggtgcacactggggtccgcacatccgcaagtggatgtcggcgacaactgaagcggacctgggacaatgcttcattgctgttgatcctgaagcgttcgctcctggattccatgagagaatgcaagaattcatcaacaccatgaggaatcttccggcttttgatgacaaattacgggtagaagtagcgggtgacgcagagaggaaacacgtgaagctggtccaggatatcggtggtattaactaccatccaaatcagataaaaaatgccgatgaacttgcggcgtcgctcaatgtgaagaagttgacagtgctcaaggaatactaa

SEQ ID NO: 369 - DNA, 333 bp, Ancylostoma ceylanicum
atgattcgttctgccaagaacttgctagtatcctgtccacgatctgctgtatttcttcgagcgctctcgataccgactaaagtacaacccggagagaaagtcgtggagataaatgagatgcgccgatttatggtagattgcttgaaagccgttggagcagtggaagcccatgccagacagctggctgatgtgcttatcgaaggagacgttcgcggtcactacagtcatggattgaatcgacttgatatgtacgtcagggattgtgagaagaaagtggtcaacacggatggagttccaaaaatactgaagctctatggaacactagcgaactag

SEQ ID NO: 370 - DNA, 963 bp, Ancylostoma ceylanicum
atgttcgatcgaaaccccattctggaacgcctagctgcgagtgcagtagctcagatccttgggcctgcggtgcagcgcaacacactccatcagcacgaagaatttgacgaatccgccattactgttgagaatgctcagcatctgcgtctactctatcagattcgtgaagtccttcaaagacgaaacactctacaccataccgtacacgctatggtagatgtgcctcgggcccctctcgcaacgactccacctacctcaactcaagctcagcagcaggatcccctttgttcaactaacgctgctgcttgttctagacaatgcgaaaactgtggaaacaatcagcaaaagctcatatatcttgcacaattaatgcagaatatccgtatcggacaaagcaatttgaacaatctcgtctcccaacccgaaagcgaatccggggtcttcaaaactcctccaacaccatcaacacccacagcggtcgcacaaactgtaacacaggaaaagtctacagtacgaacatcgaaaactacggaaaagttggagggaaacgacattacgatgtcagtaaaaatctacattccatcaccaccacccggcataaagtgcagctacatcggacgtctgattgggccgaatggaataacgattcgtgaattgcaacttgaaactcgctgtcacatcgcagttcgtggaaagggaagcattaaggataacaagttgttccgcaagatgcgccataagccaggtttcggacacctcagagaagacacgcacgtgctaattgaagcgaaagcctcgacccgtgcagaatgtcgatccttgattgaaaaggccaagaaacgcatctcggacatgttcactccggaattcgactcgctgaaaagggaacagctgatccacctggcgatgttgaacggaacttacagacagaacggcaccggttcgacgcccaaatcgccatga

SEQ ID NO: 371 - DNA, 1173 bp, Ancylostoma ceylanicum
atggagcctcgtctggctgctggtcgtcaagcgactgaacagcgtgcggagctgtgtcgacagaatgtcagcagcaaggctgccgagaacgctgctgccctcgcggatcaacttgttctcgaattcctcgtcatggagctcacagagccacaagctgcacaattagcaaaaacagcaggcgatggagctcagcttcagttcatcagcactatgttcgatcgaaaccccattctggaacgcctagctgcgagtgcagtagctcagatccttgggcctgcggtgcagcgcaacacactccatcagcacgaagaatttgacgaatccgccattactgttgagaatgctcagcatctgcgtctactctatcagattcgtgaagtccttcaaagacgaaacactctacaccataccgtacacgctatggtagatgtgcctcgggcccctctcgcaacgactccacctacctcaactcaagctcagcagcaggatcccctttgttcaactaacgctgctgcttgttctagacaatgcgaaaactgtggaaacaatcagcaaaagctcatatatcttgcacaattaatgcagaatatccgtatcggacaaagcaatttgaacaatctcgtctcccaacccgaaagcgaatccggggtcttcaaaactcctccaacaccatcaacacccacagcggtcgcacaaactgtaacacaggaaaagtctacagtacgaacatcgaaaactacggaaaagttggagggaaacgacattacgatgtcagtaaaaatctacattccatcaccaccacccggcataaagtgcagctacatcggacgtctgattgggccgaatggaataacgattcgtgaattgcaacttgaaactcgctgtcacatcgcagttcgtggaaagggaagcattaaggataacaagttgttccgcaagatgcgccataagccaggtttcggacacctcagagaagacacgcacgtgctaattgaagcgaaagcctcgacccgtgcagaatgtcgatccttgattgaaaaggccaagaaacgcatctcggacatgttcactccggaattcgactcgctgaaaagggaacagctgatccacctggcgatgttgaacggaacttacagacagaacggcaccggttcgacgcccaaatcgccatga

SEQ ID NO: 372 - DNA, 681 bp, Ancylostoma ceylanicum
atggcgagccaactcactctcactcctcccgctctcctcacctcctcctcctcctcgtcctctcgtgttcatttcaccataaacgtgccttatagttcgtttctaggagaatacagttgcgctcgggtcaaacttcttcttcgaagggagtacagttactacctcatccaactctacattccatgtattatgctggtggtcgtgtcgtgggtgtcgttctggctggacaaggatgcagtgccggcccgcgtctcgctgggggtcaccacgctgctgacgatgaccacgcaggcgagtggcatcaactccaagctgccacccgtctcctacatcaaggctgtcgacgtgtggataggcgtttgtttggcgtttattttcggagctctgctcgagtatgcagtcgtgaactactacgggcgcaaagagttccttagaaaacaaaagaagaaaaccacgcggttggacgactgcgtttgtccgtccgatcgccctgcgctgcgactcgacctcagcagttatcgaaggcggggctggactcccctgaataggctattggatattttgggtcgaaacaccgatctctcgcggagggtggatttgatgtcacgaatcaccttcccgtcattgtttactgctttcttgggtgagtcccttttcacgggggagtgtatcgaaaaatag

SEQ ID NO: 373 - DNA, 681 bp, Ancylostoma ceylanicum
atggcgagccaactcactctcactcctcccgctctcctcacctcctcctcctcctcgtcctctcgtgttcatttcaccataaacgtgccttatagttcgtttctaggagaatacagttgcgctcgggtcaaacttcttcttcgaagggagtacagttactacctcatccaactctacattccatgtattatgctggtggtcgtgtcgtgggtgtcgttctggctggacaaggatgcagtgccggcccgcgtctcgctgggggtcaccacgctgctgacgatgaccacgcaggcgagtggcatcaactccaagctgccacccgtctcctacatcaaggctgtcgacgtgtggataggcgtttgtttggcgtttattttcggagctctgctcgagtatgcagtcgtgaactactacgggcgcaaagagttccttagaaaacaaaagaagaaaaccacgcggttggacgactgcgtttgtccgtccgatcgccctgcgctgcgactcgacctcagcagttatcgaaggcggggctggactcccctgaataggctattggatattttgggtcgaaacaccgatctctcgcggagggtggatttgatgtcacgaatcaccttcccgtcattgtttactgctttcttggtcaatggaaaaaatgccgtaaaataccgtaaagtgtga

SEQ ID NO: 374 - DNA, 1245 bp, Ancylostoma ceylanicum
atgcgcgcttccgccgtccagggtcggcgtctggggctgtggctggccctcatctgcgccttcggcgtgtttcgtggcgccggcgccaaacgcaagctcaaggaacaggagatcatccagcgtatcctcaacaactacgactggagggtgcgaccgcgaggactcaacgcctcgtggccagacaccggcgggccggtgctggtcaccgtgaacatctacctccgctccatctcgaagatcgacgacgtgaacatggagtacagcgcgcagttcactttccgcgaggaatgggtggatgcgcggttggcctatggtcgattcgaggacgagtccactgaggtgccgccattcgtcgtgctggcgacgagcgagaacgccgaccagtcgcagcaaatctggatgccggacacgttcttccagaacgagaaggaagcgcgacggcacttgatcgacaagccgaacgtgttgattcggattcataaggacggctcgatcctgtacagtgtcaggctttccctcgtactgtcgtgtccgatgtctctggagttctatccgctggatcgacaaaactgcctcattgacctggcgtcgtatgcatacacgacgcaggacatcaagtacgagtggaaggcgacgaacccggtgcagcagaaggacggcctgcgccagtcgctgcccagcttcgagctgcaggacgtcgtcaccaagtactgcaccagcaagaccaacacgggcgagtattcatgtctccgtactcagatggtactgcgtcgcgagttcagctattacctgctgcagctgtatatcccttcgtttatgcttgtcattgtgtcatgggtgtcgttctggctcgacaaagactccgtccctgcacgagtcacgctaggagtcaccactctgctaaccatgacaacgcaggaaaggctccccagttccggcatcaacgcgaagctgccgcccgtcagctacaccaaggcgattgatgtgtggatcggtgtgtgtctggcttttatattcggcgccttgctggaattcgcgctggtgaactacgccgctcggaaggacatgaccagctgtggacagcgcatgatgaagcagctgccgcaggacggctaccggccgttgtccgggagccagcctcgcacgtcgttctgctgtcgaatattcgtgcgacgttacaaagaacgctcgaagcgcatcgacgtcgtctctcgtctggtaacaacgtcacatctatttgcctag

SEQ ID NO: 375 - DNA, 822 bp, Ancylostoma ceylanicum
atggttcacgagcggattcaagcagagaaggtcgatgtatccattctcggaactcctctaaccttccgtaattaccgcaaagcgaaaaaccgttttctcaaggcttcactcacggaaagaatcagtacatgggatgtagaagatctctcgatgagaggcataccaacacaggagttgatcaacgtctacgacaagtggggacacggtggctatggggttattctcacaggaaatgtgatggttgacccgcgcaatttggaaagtgctgggaacatgattatctgtagagagaacgattcaccagagttacgaaaagcgttcacggaattggttagagtttcgaagcaagatggagcacttgtcatcgcacaactctcccatgctggacggcaaacttcaataggtgttaatgagcggccgtactcgtgttcagacgtgcaactagtgaccgatttcataaaagctggaaagcctatacctctggcacttgatcagatcaagccagaagtgatcgaccggtttgtatacgcagcgaagctcgcatatgaaacaggttttgacggggttcagcttcatgctgctcatggttacttgctgtcacagtttctatcaccgaccaccaataagcgcacggataaatacggtggatcgttaaggaacagagctcgcatcattgtggaaatctacgaagcaatcagaaaagagataccagcagcaacaggattcgttgtgggaatcaagaccaattcagtagagtttcaagcggagggcctgacagttgaagacgccaaggaagcctgttccatcatggaggtttgttga

SEQ ID NO: 376 - DNA, 393 bp, Ancylostoma ceylanicum
atggagaagactttgttccatcatgaacgagaatcgactaggagacgtgaagcgttcttccttgaattcgcagagaagattcgccccgtcttcaaagagactgttgtatacgtcacaggagggttccgcactgcgaaggggatggtaaatgcaatcagaagcggtgctaccgatggtataggtctgggacgacctattacagcagaaccagatctgccacgaaaaatcctcataggaacctgtttctctgcacctgacacgaaaataaacccagacgacttcttgatgacattctacgtcagcaccgctcaaatgggacaaatggggaaacttcctgctagtaaactgaaaaagtcttgctttccacttatcatttcaaccgatatctactga

SEQ ID NO: 377 - DNA, 501 bp, Ancylostoma ceylanicum
atggagaagactttgttccatcatgaacgagaatcgactaggagacgtgaagcgttcttccttgaattcgcagagaagattcgccccgtcttcaaagagactgttgtatacgtcacaggagggttccgcactgcgaaggggatggtaaatgcaatcagaagcggtgctaccgatggtataggtctgggacgacctattacagcagaaccagatctgccacgaaaaatcctcataggaacctgtttctctgcacctgacacgaaaataaacccagacgacttcttgatgacattctacgtcagcaccgctcaaatgggacaaatggggaaacttcctgctagtaaactgaaaaatgtatgtgagggtatcgctgaccttagtatgaaagacgaagcggagcacttcaagaagcatgtcgcaagctacattgaaggtgtgagaaaactcgtcgaagccagcgaaccagttcccggggtgtttcagtacaagaacctacactga

SEQ ID NO: 378 - DNA, 1257 bp, Ancylostoma ceylanicum
atgaatgcgtctggtagtcgcatcagagcagtacagccaccgcttcactttttcgaggtgcatgagcgcataccagcggagaaaacggatgtgtctatccttggcaaagaaatcattttccgcaatggacgcacggcaaaaaaccgatttcttaaggccggcatgtcggaaagaactagcacatgggatgtggaagacctctccaaaagaggtataccgacacaggagctcatcaatatttacgataagtggggacacggaggttttggtgttatcattactgggaatatattggtggatccgcgcaatctggaagccgctgggaacgcgattatttgcagagagaacgattcccagcgactgagggacgcattttcaaggctgacggatgcagcaaaacaggatggagcgctcgttatagctcagctctcccatgctggccgacaaacaccagtttatgtcaataggtatccgtattcatgctccgataaacgactagtgggtggcgtaataaaagctgcgcaacccgtgcctctggctctggatcaaataaaaactgaagtaatcgacagattcgtgtacgctgccaaggtcgcgtacgaaacagggttcgatggagttcaacttcatgctgcacacggctatttgttatcacaattcctttcacctactactaatgagcgaactgacagatatggcggcccactgaaaaacagagcacgaatcatccttgaaatcatggaagcgatcagaaacgaaactgcggagcatttcatcgtgggaatcaagacgaactcggtagaatttcaagcgaatggtcttaatattgatgacgccaaagcagcatgttcacttatggagaaaagtggttttgacttcgtagaactatcaggaggcactttggaaaagccagcttggatgcacgaaagagtttcctctgtaacgcgtgaagctttcttcatggaatttgcagagaagatccaacctgttttcaaaaagactgtggtttacgtgacaggcggattccgaacagcaaccgcgatggctaaggcggtcaaaagcggtgctacggacggcattggtttggcaaggccagtaactgcagaaccagatctccctctgaagattctaagtgggttctgccactctgcctcagacactaaggtcaatccggacgattttattatgacgtttctggttagcacatcgcaaatttctcaaatgggaaggctaccgacttctgtactaaccaagtaa

SEQ ID NO: 379 - DNA, 1401 bp, Ancylostoma ceylanicum
atgaatgcgtctggtagtcgcatcagagcagtacagccaccgcttcactttttcgaggtgcatgagcgcataccagcggagaaaacggatgtgtctatccttggcaaagaaatcattttccgcaatggacgcacggcaaaaaaccgatttcttaaggccggcatgtcggaaagaactagcacatgggatgtggaagacctctccaaaagaggtataccgacacaggagctcatcaatatttacgataagtggggacacggaggttttggtgttatcattactgggaatatattggtggatccgcgcaatctggaagccgctgggaacgcgattatttgcagagagaacgattcccagcgactgagggacgcattttcaaggctgacggatgcagcaaaacaggatggagcgctcgttatagctcagctctcccatgctggccgacaaacaccagtttatgtcaataggtatccgtattcatgctccgataaacgactagtgggtggcgtaataaaagctgcgcaacccgtgcctctggctctggatcaaataaaaactgaagtaatcgacagattcgtgtacgctgccaaggtcgcgtacgaaacagggttcgatggagttcaacttcatgctgcacacggctatttgttatcacaattcctttcacctactactaatgagcgaactgacagatatggcggcccactgaaaaacagagcacgaatcatccttgaaatcatggaagcgatcagaaacgaaactgcggagcatttcatcgtgggaatcaagacgaactcggtagaatttcaagcgaatggtcttaatattgatgacgccaaagcagcatgttcacttatggagaaaagtggttttgacttcgtagaactatcaggaggcactttggaaaagccagcttggatgcacgaaagagtttcctctgtaacgcgtgaagctttcttcatggaatttgcagagaagatccaacctgttttcaaaaagactgtggtttacgtgacaggcggattccgaacagcaaccgcgatggctaaggcggtcaaaagcggtgctacggacggcattggtttggcaaggccagtaactgcagaaccagatctccctctgaagattctaagtgggttctgccactctgcctcagacactaaggtcaatccggacgattttattatgacgtttctggttagcacatcgcaaatttctcaaatgggaaggctaccgacttctgtactaaccaacgtctgcgaaggaattgctgatttgagcatacaagaagaagccgaaaattttaaggaacgtgcggcagagtggattctggaaactaggaagcacagagattccagaaaaccaactccagaagttttccattacaagaatttattttaa

SEQ ID NO: 380 - DNA, 1296 bp, Ancylostoma ceylanicum
atgcattcatgttccgcatatccgtatcgttcttcttacgccgtttccggttcaccacttcgaggatatcattcactgacgcggcatgacgacaatgtgtttccttccttctcatcagcgcgaagtgtatcatccaggtgccgccgactgtcatctgcagctgcagattgcagattgaagagtagtggcagtgatggtcgaaaatcgccatcgtttggatcaggttctcctgatggagcgtcacacatggactgttccctagagtatttagctgacttagttaaggagaaaaaagacttggaaatgttcggagataactttcaacacgtggatcgtttgctcagtgaggagatctcgcgagtgcgtggagcgctgtttcagacagaatttgtaactgaacccttcgacttaccagagcccatcggtgatgtggtaaccataactgaaaagatatatgtaccaaagagagagtatcctgacattaatcacgtattattactagtgattgctggaaagcatccgttaattgtagtacaactttgttggacgcattcttggaccacgtggcatgacagcaaagcagctggaacaggaaactggctgcaagattatggtcagaggcaaaggttccatgcgcgacaagcgaaaggtttggattcttccttgcacgtcatagaattgaaacaggtggcatttttgaaggaagaagccaatcgtgggaagccgaactgggaacacttggacgacgagctgcatgtccttctacagtgcgaagatactgaaaatagagcgagaattaaacttcgtgcagcaatggaacatgtgaagaaattgctagttccagcgccggaaggaactgatgaactcaagaggaagcagctgatggagctagctatcattaacgggacatatagaccatttcacaaatccggactatccaactcaaacagaattctaacgcctgtgccattagtatcacctattcgtgctcctatctttgtttcgccaacaagcagccccaatagtgtcagcgtacagaagtcgtcaaacccaggatacattggcgcggctactcagcagccttttgattactcttcattcatgaaccccaatttcctcgaatcagctttggcttctttccaaattgctaatgaactacatctccctacgtttcccacagcgacatcgctggtgaacacctttccatcgttgttcatggggacgtctgcgaactcagtacctacacaagacgcttccactgcagcacccgctctcagcccaaccaagtgcttctga

SEQ ID NO: 381 - DNA, 1392 bp, Ancylostoma ceylanicum
atgctgttaataaacttgctgcgctcgaattacagtagtaattatcctataaaagtcagtgacgctgagttgttgttttgtttcagcgaggaaggaatgcattcatgttccgcatatccgtatcgttcttcttacgccgtttccggttcaccacttcgaggatatcattcactgacgcggcatgacgacaatgtgtttccttccttctcatcagcgcgaagtgtatcatccaggtgccgccgactgtcatctgcagctgcagattgcagattgaagagtagtggcagtgatggtcgaaaatcgccatcgtttggatcaggttctcctgatggagcgtcacacatggactgttccctagagtatttagctgacttagttaaggagaaaaaagacttggaaatgttcggagataactttcaacacgtggatcgtttgctcagtgaggagatctcgcgagtgcgtggagcgctgtttcagacagaatttgtaactgaacccttcgacttaccagagcccatcggtgatgtggtaaccataactgaaaagatatatgtaccaaagagagagtatcctgacattaatcacgtattattactagtgattgctggaaagcatccgttaattgtagtacaactttgttggacgcattcttggaccacgtggcatgacagcaaagcagctggaacaggaaactggctgcaagattatggtcagaggcaaaggttccatgcgcgacaagcgaaaggtttggattcttccttgcacgtcatagaattgaaacaggtggcatttttgaaggaagaagccaatcgtgggaagccgaactgggaacacttggacgacgagctgcatgtccttctacagtgcgaagatactgaaaatagagcgagaattaaacttcgtgcagcaatggaacatgtgaagaaattgctagttccagcgccggaaggaactgatgaactcaagaggaagcagctgatggagctagctatcattaacgggacatatagaccatttcacaaatccggactatccaactcaaacagaattctaacgcctgtgccattagtatcacctattcgtgctcctatctttgtttcgccaacaagcagccccaatagtgtcagcgtacagaagtcgtcaaacccaggatacattggcgcggctactcagcagccttttgattactcttcattcatgaaccccaatttcctcgaatcagctttggcttctttccaaattgctaatgaactacatctccctacgtttcccacagcgacatcgctggtgaacacctttccatcgttgttcatggggacgtctgcgaactcagtacctacacaagacgcttccactgcagcacccgctctcagcccaaccaagtgcttctga

SEQ ID NO: 382 - DNA, 1191 bp, Ancylostoma ceylanicum
atgcattcatgttccgcatatccgtatcgttcttcttacgccgtttccggttcaccacttcgaggatatcattcactgacgcggcatgacgacaatgtgtttccttccttctcatcagcgcgaagtgtatcatccaggtgccgccgactgtcatctgcagctgcagattgcagattgaagagtagtggcagtgatggtcgaaaatcgccatcgtttggatcaggttctcctgatggagcgtcacacatggactgttccctagagtatttagctgacttagttaaggagaaaaaagacttggaaatgttcggagataactttcaacacgtggatcgtttgctcagtgaggagatctcgcgagtgcgtggagcgctgtttcagacagaatttgtaactgaacccttcgacttaccagagcccatcggtgatgtggtaaccataactgaaaagatatatgtaccaaagagagagtatcctgactacaactttgttggacgcattcttggaccacgtggcatgacagcaaagcagctggaacaggaaactggctgcaagattatggtcagaggcaaaggttccatgcgcgacaagcgaaaggaagaagccaatcgtgggaagccgaactgggaacacttggacgacgagctgcatgtccttctacagtgcgaagatactgaaaatagagcgagaattaaacttcgtgcagcaatggaacatgtgaagaaattgctagttccagcgccggaaggaactgatgaactcaagaggaagcagctgatggagctagctatcattaacgggacatatagaccatttcacaaatccggactatccaactcaaacagaattctaacgcctgtgccattagtatcacctattcgtgctcctatctttgtttcgccaacaagcagccccaatagtgtcagcgtacagaagtcgtcaaacccaggatacattggcgcggctactcagcagccttttgattactcttcattcatgaaccccaatttcctcgaatcagctttggcttctttccaaattgctaatgaactacatctccctacgtttcccacagcgacatcgctggtgaacacctttccatcgttgttcatggggacgtctgcgaactcagtacctacacaagacgcttccactgcagcacccgctctcagcccaaccaagtgcttctga

SEQ ID NO: 383 - DNA, 1287 bp, Ancylostoma ceylanicum
atgctgttaataaacttgctgcgctcgaattacagtagtaattatcctataaaagtcagtgacgctgagttgttgttttgtttcagcgaggaaggaatgcattcatgttccgcatatccgtatcgttcttcttacgccgtttccggttcaccacttcgaggatatcattcactgacgcggcatgacgacaatgtgtttccttccttctcatcagcgcgaagtgtatcatccaggtgccgccgactgtcatctgcagctgcagattgcagattgaagagtagtggcagtgatggtcgaaaatcgccatcgtttggatcaggttctcctgatggagcgtcacacatggactgttccctagagtatttagctgacttagttaaggagaaaaaagacttggaaatgttcggagataactttcaacacgtggatcgtttgctcagtgaggagatctcgcgagtgcgtggagcgctgtttcagacagaatttgtaactgaacccttcgacttaccagagcccatcggtgatgtggtaaccataactgaaaagatatatgtaccaaagagagagtatcctgactacaactttgttggacgcattcttggaccacgtggcatgacagcaaagcagctggaacaggaaactggctgcaagattatggtcagaggcaaaggttccatgcgcgacaagcgaaaggaagaagccaatcgtgggaagccgaactgggaacacttggacgacgagctgcatgtccttctacagtgcgaagatactgaaaatagagcgagaattaaacttcgtgcagcaatggaacatgtgaagaaattgctagttccagcgccggaaggaactgatgaactcaagaggaagcagctgatggagctagctatcattaacgggacatatagaccatttcacaaatccggactatccaactcaaacagaattctaacgcctgtgccattagtatcacctattcgtgctcctatctttgtttcgccaacaagcagccccaatagtgtcagcgtacagaagtcgtcaaacccaggatacattggcgcggctactcagcagccttttgattactcttcattcatgaaccccaatttcctcgaatcagctttggcttctttccaaattgctaatgaactacatctccctacgtttcccacagcgacatcgctggtgaacacctttccatcgttgttcatggggacgtctgcgaactcagtacctacacaagacgcttccactgcagcacccgctctcagcccaaccaagtgcttctga

SEQ ID NO: 384 - DNA, 669 bp, Ancylostoma ceylanicum
atggatcccgaaggtatcacgatagctactggacaaccgtcggataaaaatgaaattctggatttcctcgtcaagtactttctagtggatgaaccaatgaatcaggccgcaaaaattgataagtcggactttttacccatagccaacacaatcgctacacgctgtttacgaactcctttcagtgctgtggcacgtgacaaaggaacgaacgaggtcgtcggagtgaatctaaactcagtatggcgacgaggtgatgaggagaatgagtactacaataccaagacgaggacagacgagctagcgaaagcgcatgacaaaatcatgaacgaaatccattcttccttctggaaactagcgtctgatgacttctccgttgtactacacagtgaaatcagcagtgtgtcgccgcattatcgacgtcgtggaatcgcgtccagtctttataagaaaaccatcgacaaagagaacattgagaaattcgccatacaaggcatcgtctcggaggcgtcatcgacagccaaccaacaattgctaaaaaagcaaggatttgatgttctacgagaaatcatgtacgaagactatcgtggcagcaacggtgaagtgctactcaaaccaaaagatggatcaaaatcgattgctttatgttggaaaccattgaatttatcttga

SEQ ID NO: 385 - DNA, 3504 bp, Ancylostoma ceylanicum
atgcgacgatgtgccagcaacgctctgcgttgtctccaatgtagcagggcctatcggcctattaggcccatctatacaacagcgttgaggttgcaagagaagttacgaaaagcaaccacaaatcctatagtagagagtctacgctatgagcggaaatcaccaatagagcatattcttctgcgaccggacacctacgtgggatccacagctgttgcggaagatacggctgcgtggatagtctctgaggataatctacggatggtacagaagtcgttgacatattcccctgctctgttgaaaatttttgacgaaatccttgtgaacgctgcagataataagcagagggattctgaaatgaacgaacttcgggtggatgtggatcgggagcaagggaagataacaatattcaacaatgggcgtggcctacccatcgaaatccaccccaaagaaggcatctacgtgccgacgttgatctttggaaatctattcacatcatcaaattatgacgacagagaagttaaagttgttggaggccgcaatggctacggtgctaagctttgcaacattttttcaaaagagtttgtggtggagacgtcgtcacgtgaaaatgggcggagcttcaagcagacatggaccaataacatgcgacagtgtgacgaaccaatagtgaccgaagatgcggagacaacggatggaactcgggtcacattttgcccggatctggcgaaatttggtctttctaaactggacgacgccatttgtgagatgttcaaaaagcgcacttttgatgtcgccggaactttacgcggagtgactgtctactacaatggaaaactagtggaagtgccatctttccgagaatatgttggtttatattccgacgatgtgaattcgaatgatgtactgtatgtgaacgcgagcagacgatggcaatgggctgtgaagaagtcgacagctggcttccagcagatatcattcgtcaataatattgccaccacagggggtggaaaacacgttgatcacattgtcgaccaattagtgaacatcataaaaccactagtggactcacaactgaaaacaggaatcaagaaaattgtgatcaaaaaccagctgtgcgtctttgtcaacgctctcatagaaaatccagcattcagcagtcaaacgaaggatgttctgaccacggctgcaagagactttggatcgaaatgtgtatgtgacgcggcgacggtgcagacatgggccgttgagtcaggattggtggatgaattgacgagcgaggcgcaagctaaagagggacgtccggcaaggaagatgaagccaaaagttgaggatttgtcggatattgtgaagctggaggatgctaattgggcaggggacatcacgcattctcaggattgtcgacttttgatcactgaaggagactcagcaaaagctctagctgtcgctggtttagaagtcgttggacgtgatcgctacggtgtatttcctgtcatgggcaaattcatgaatgtctcaggaatgtcaaaagaaaaggcaactgcttcaaaagaagtgaatcacctgatgcgaattctgggcctaaaatatggcgagaactatttgataccagagaatcgtgccaggctaaggtacggtgggataattatactgacagatcaggatgaggatggatcccatattaaaggacttatcattaatttcctccatacattttggccagaactgctccagaacggatttatacagtcgtttatgacacctcttctcaaggcacgtcgcggttcagaaactctcagcttttattccatggatgagttcaagaaatggaaagggagtactgaagacgctgacaagtacacgataaagtactacaagggtcttggaacatccacctccaaggaagcccgcgaatatttttcaaatttcgagaaacacctgataaatttccgttacgaagacgagaaagacgacgagacgattcgcatggctttcgataagcgtagatccgatgatagaaagcgatggattactgagaggttacaggcggatgatatcatggataattcttcgatgaatgaagcgacgtataaggaatttgtagataacgagttgttccggtattcgttgcttgatttgaggagatcgatcccctccgtcgtggatggactgaaaccatcgcaacgcaaagtaatccatacattactgcgaagaagttccaacaaagagatcaaagtgaatcaactcgctgctgctgttgcactgaatgaagcttatcatcatggagagggaacactggtgacgacggttgtgagattggctcaggattttgtgggaatgaataatgcttgcttactggagccactggggcagtttggtacaaggcatgaaggaggtgatgatgcggctagtgcacggtatatctacaccagactgagccccattactcgccttgtattcccacctgctgacgacgaattgctcaactacttacaagaggaaaatcagctgatcgaacctgattggtactgcccgattgtcccgatggtgcttgtgaatggtgccgagggtattgccacaggatggtcgacacgagtacttagtcacgacatccgtgaaataatcgataatgttcgtcgactaatcgatggaggcgaagtggagaagatgacaccgtcattctcggatttctctggaaaaatccaggaactcggcgagaatcgctatgagatatgcggaaagttcaaaattattccatctcaacgaaggaatgtatcgaatctgaaaatagaaataactgagctgccagtgggcgagtggacaaacagatataaacagaatacattgcacacgctacaagcaaagggattgatatgtggcttcaaggaacaccatacagaaagaggcgtgcacttcattgtcgaattaggcagagagctaaccgagaggtgtagaagagctgttggtcgacattcggaaattatgaagagattcaaactatccacgacaataacgataaactctatggccctattcgatcctgctggtcacctacacaactacacgtcagctgccgatattatgcgtgaacacttccatattcgtcaacagatgtacgaaaaaaggaaagagcatgagacgaaaatgttgggagcccaaaagcggagggtagagaatcagcttcgattcgttgaggctacaattagtggcagtgttcgtccaaatgggaaacgcttggtggacttcgagcaagagctgctatccatgggtttcgaggtggatcctgtgaaacagtggaagaatgaggatgcagacctatcctacctgataaacctaccactaagtcgccttacagtggaggaagtgcagaagctccgcaaccaggtggaaaacacccgaaacaagtttgacagggtggtccagacatcatggcaagactcgtggatagctgacctgaaggcacttcagcgggaagtggataatttgcttcggagagcgtctgagtga

SEQ ID NO: 386 - DNA, 1686 bp, Ancylostoma ceylanicum
atgttcttgattcgagtgcttcttctaatatttgccctagcagaagagtcgctcgaaaagccaccgaagagtctctctcgtatgagaggcggcaagggatcctacggtactgcaaacatcgccatcgcatcgttaaccaatccgggccagcaactcagctcgtacgacacgaaggatgaggagcaggacgagttgacgacggcgcggaacatcagctcagccgagcaggcgacgagtgtgggaacgccgcgatcggacgaggcgctcgacgtggatgatctcgacgaaattctcgccggcgatttggattcgcctgagtatgacaaggagccaacattcgagaacggagacaacgacgacgcctcggtggaggaagcgacgacatcagcggagagcgaaccaccaacaacgctcgaagacattgccaggatacgcatagaggaaagaagacccattgaacaaccgcaatcgtctgatacggaacttctcgagaaacttctcagtaaaggatatgattggagagtgcgaccaccgggcgcagacggcacaatccacggtggtcctgtcgtagttgctgtcaacatgctgatcagaagcatatctaaaatcgacaacgtaaacatggagtacagtgttcagctgacgtttcgtgagagttggaaagacgacagactgaggtacggagtagacggcgatactcttccggacttcttaattctgacagctggacaacaaatctggatgccggactcgtttttccagaacgagaagcacgcctataagcatatgattgacaaaccgaacgtgctaatccgtgttcacaaggatggcacgatcctctattcggtgaggatctcgctagtgctctcatgtccaatgcatctacagttctatccaatggacgtgcaacaatgtttcatagaccttgcatcctacgcctatacaacaaaagatattgaatacgtgtggaagagtgaagaacctgtacagctcaagcagggtctgtcctcttctctgccgtcttttcaactgaacaacgtctccacaacctactgtaccagcaaaacgaacactggcacttattcgtgcctgaggacagttctacaattgaaaagacagttcagctactacctcctccaactgtacattccttcgtgtatgcttgtgatcgtctcatgggtttcattctggatcgacaggacagctgtgccagcacgggtgacgctaggggttaccacacttcttactatgacaacacagtcatcaggtataaacgcaaaactcccaccggtagcgtatatcaaggcgattgatgtgtggataggagcttgtctaacgttcatcttctgtgcacttctcgaatttgcttgggtaacctatgttgcgaatcgggcacagccgaaaaagcgtgaaaacaaaaaagcagcattgcttgtaaaatcaagcgaggaggtatgggttcctcggatcgttatggatcaggaattggaaaaagtgaaagtgctgcagaatcgccggcatgcgtcatggtcgctttgccggtggttggagagggcaacggattggaaggacgagtcaaagaggccggatctgatatccagattgttattcccaatacttttcgcgtctttcaacgtcgcctactggcttcactatgctcaataccagtcgccaggaccgcattga

SEQ ID NO: 387 - DNA, 642 bp, Ancylostoma ceylanicum
atgaaatcatcgtcattggcttcatgtccttcgagagcgaatcttttgcctgcaataacatcatttgtctgaacaaacaacccagtcattgtggacgtcaacttctatgtaaggagcatctcaaatatcgacttcgtgagaatggagtacaaccttcaaattacatttcgacagtactggcatgacccacgcttagaatacagctccatgtttggaggaaaagaagtgcctgatttcttgataattactgagagggattccatatggactccggacaccttcttcttgaacgagaagcgtgctcaccgtcacgagatcgataaactgaatttgatgattcgaattcacgctaatggttcagtaatgtactcggaacgaatatctctcactctctcttgtccaatgtacatacagctattgtcgtggtcaccgcgatacaaacgtcagccaaagcggacagctgaacacggcgccacgcggccgccgtgcaacaccgccgcgaggctgctgcgtggcgacggcttatcgatcggttccttctttcaggccgcgccttcggctcttttgttaatttcagctagaattttcacgtttgccacccatttcggtgagttcgttgtggtagatggtacaggtaactga

SEQ ID NO: 388 - DNA, 663 bp, Ancylostoma ceylanicum
atgtgttcaacagttatcgacgaatctgccacaatcacaacaagactcatgattttggtaaaaggttttgcgtttattatagggttgggcagaacaaacaacccagtcattgtggacgtcaacttctatgtaaggagcatctcaaatatcgacttcgtgagaatggagtacaaccttcaaattacatttcgacagtactggcatgacccacgcttagaatacagctccatgtttggaggaaaagaagtgcctgatttcttgataattactgagagggattccatatggactccggacaccttcttcttgaacgagaagcgtgctcaccgtcacgagatcgataaactgaatttgatgattcgaattcacgctaatggttcagtaatgtactcggaacgaatatctctcactctctcttgtccaatgtacatacagctattgtcgtggtcaccgcgatacaaacgtcagccaaagcggacagctgaacacggcgccacgcggccgccgtgcaacaccgccgcgaggctgctgcgtggcgacggcttatcgatcggttccttctttcaggccgcgccttcggctcttttgttaatttcagctagaattttcacgtttgccacccatttcggtgagttcgttgtggtagatggtacaggtaactga

SEQ ID NO: 389 - DNA, 615 bp, Ancylostoma ceylanicum
atgattttggtaaaaggttttgcgtttattatagggttgggcagaacaaacaacccagtcattgtggacgtcaacttctatgtaaggagcatctcaaatatcgacttcgtgagaatggagtacaaccttcaaattacatttcgacagtactggcatgacccacgcttagaatacagctccatgtttggaggaaaagaagtgcctgatttcttgataattactgagagggattccatatggactccggacaccttcttcttgaacgagaagcgtgctcaccgtcacgagatcgataaactgaatttgatgattcgaattcacgctaatggttcagtaatgtactcggaacgaatatctctcactctctcttgtccaatgtacatacagctattgtcgtggtcaccgcgatacaaacgtcagccaaagcggacagctgaacacggcgccacgcggccgccgtgcaacaccgccgcgaggctgctgcgtggcgacggcttatcgatcggttccttctttcaggccgcgccttcggctcttttgttaatttcagctagaattttcacgtttgccacccatttcggtgagttcgttgtggtagatggtacaggtaactga

SEQ ID NO: 390 - DNA, 582 bp, Ancylostoma ceylanicum
atgtatacatgaacaaacaacccagtcattgtggacgtcaacttctatgtaaggagcatctcaaatatcgacttcgtgagaatggagtacaaccttcaaattacatttcgacagtactggcatgacccacgcttagaatacagctccatgtttggaggaaaagaagtgcctgatttcttgataattactgagagggattccatatggactccggacaccttcttcttgaacgagaagcgtgctcaccgtcacgagatcgataaactgaatttgatgattcgaattcacgctaatggttcagtaatgtactcggaacgaatatctctcactctctcttgtccaatgtacatacagctattgtcgtggtcaccgcgatacaaacgtcagccaaagcggacagctgaacacggcgccacgcggccgccgtgcaacaccgccgcgaggctgctgcgtggcgacggcttatcgatcggttccttctttcaggccgcgccttcggctcttttgttaatttcagctagaattttcacgtttgccacccatttcggtgagttcgttgtggtagatggtacaggtaactga

SEQ ID NO: 391 - DNA, 387 bp, Ancylostoma ceylanicum
atggacgagcaggtgtgcagtctggatctcgcgtcgtacgcgttcacaacggacgatattgtgtaccgctggtacgttcctaatcccatacagtttcatccgatgctgaacacttcactgccttgttttactgtggatcaagcttacactgacatgtgtacgagtataacgactacaggagaatactcttgcatcagaatggtgtttcacttgaaaaggctgttcagctactatatggctcagatctatattccctcatcactactcgtagttgtctcatgggtgtcattctggttggataggacggcagttccggcaagagttactcttggggttaccactcttctcacaatgacaacgcaggtagtgttcagacaattgacataa

SEQ ID NO: 392 - DNA, 522 bp, Ancylostoma ceylanicum
atggacgagcaggtgtgcagtctggatctcgcgtcgtacgcgttcacaacggacgatattgtgtaccgctggtacgttcctaatcccatacagtttcatccgatgctgaacacttcactgccttgttttactgtggatcaagcttacactgacatgtgtacgagtataacgactacaggagaatactcttgcatcagaatggtgtttcacttgaaaaggctgttcagctactatatggctcagatctatattccctcatcactactcgtagttgtctcatgggtgtcattctggttggataggacggcagttccggcaagagttactcttggggttaccactcttctcacaatgacaacgcaggcagcttcgatcaacaacagtctgccagccgtctcctacgtcaaggctgtcgacgtctggattggagtgtgcctggctttcatttttgctgctgtactcgagtttgcatgggtgtcctacagaggatctctacaaagtgaatgtgaggtgttaaattag

SEQ ID NO: 393 - DNA, 246 bp, Ancylostoma ceylanicum
atgacgcgagctggcgatcgatacccacctgttgtctgctggagcgctgccagcagtactccacacgtcatgccacgtggtgcactcgcagcttcgatcaacaacagtctgccagccgtctcctacgtcaaggctgtcgacgtctggattggagtgtgcctggctttcatttttgctgctgtactcgagtttgcatgggtgtcctacagaggatctctacaaagtgaatgtgaggtgttaaattag

SEQ ID NO: 394 - DNA, 1002 bp, Ancylostoma ceylanicum
atggtgaaggagacgaagtactatgacgttctcggcgtctcgcccaacgcaacggatagcgaactcaagaaagcgtaccgtaaattggcgctgaagtaccaccctgacaagaatcctgaaggtggcgagcagttcaagttgatatcacaggcttatgaggttctctccgatgaaaagaagcgacaaatatacgaccagggcggtgaagaagcccttcaaggtggaggcggtggaggagaattccacaatccattcgatgtcttcgacatgttcttcggaggaggaagacgtcaaagagagcgtggagttcgacctactgttcatcagatgaaggtttcgctggagcagctatataacggattttctaagaaacttaaagtaaccaggactgttatctgtaccgattgtaaaggattgggcggcgtagctggttccgtagtgaaatgcagcgactgcaaaggtcgtggaatgatagttagggtgatgcaattagcgcctggaatgattcaacaagttcagtctccttgtggtgcctgtaaaggaactggtgaagtgattccggcgaaggaccgctgcaaaggatgtcaagggcaaaagaagcgcaaagtggaggaaatcctcgaagttcatgtggagaagggcatgaaggacggcgacaggatcatgttcgaaggtagaggagatgaagatcatgacgttccgcccggcgacatcgtaatcattcttgacgaaaaggatcaccatactttcttcaggaaggacgacaatcttgtaatgaatattgacattcagctcgttgaagcaatgtgcggattctcacgtgtaataaagactctcgatgacaggactctatttttcaacgtattgccaggcgaggtaattaagcactcggatatgcgggttatttacggcgaaggtatgccgcatcggaggaatcctacagagaaggttggacatgttgcttttgctcgatttatacgcattctcaactttcagttgtaa

SEQ ID NO: 395 - DNA, 969 bp, Ancylostoma ceylanicum
atggattcccgtaacacaaaggaacatgcgaacatcgtcttcataacttcttatcttcacgcgccaattattttgatgagaatggcttctgtgacgctcaatccttcttatgtaaaggcttatgaggttctctccgatgaaaagaagcgacaaatatacgaccagggcggtgaagaagcccttcaaggtggaggcggtggaggagaattccacaatccattcgatgtcttcgacatgttcttcggaggaggaagacgtcaaagagagcgtggagttcgacctactgttcatcagatgaaggtttcgctggagcagctatataacggattttctaagaaacttaaagtaaccaggactgttatctgtaccgattgtaaaggattgggcggcgtagctggttccgtagtgaaatgcagcgactgcaaaggtcgtggaatgatagttagggtgatgcaattagcgcctggaatgattcaacaagttcagtctccttgtggtgcctgtaaaggaactggtgaagtgattccggcgaaggaccgctgcaaaggatgtcaagggcaaaagaagcgcaaagtggaggaaatcctcgaagttcatgtggagaagggcatgaaggacggcgacaggatcatgttcgaaggtagaggagatgaagatcatgacgttccgcccggcgacatcgtaatcattcttgacgaaaaggatcaccatactttcttcaggaaggacgacaatcttgtaatgaatattgacattcagctcgttgaagcaatgtgcggattctcacgtgtaataaagactctcgatgacaggactctatttttcaacgtattgccaggcgaggtaattaagcactcggatatgcgggttatttacggcgaaggtatgccgcatcggaggaatcctacagagaaggttggacatgttgcttttgctcgatttatacgcattctcaactttcagttgtaa

SEQ ID NO: 396 - DNA, 1161 bp, Ancylostoma ceylanicum
atggtgaaggagacgaagtactatgacgttctcggcgtctcgcccaacgcaacggatagcgaactcaagaaagcgtaccgtaaattggcgctgaagtaccaccctgacaagaatcctgaaggtggcgagcagttcaagttgatatcacaggcttatgaggttctctccgatgaaaagaagcgacaaatatacgaccagggcggtgaagaagcccttcaaggtggaggcggtggaggagaattccacaatccattcgatgtcttcgacatgttcttcggaggaggaagacgtcaaagagagcgtggagttcgacctactgttcatcagatgaaggtttcgctggagcagctatataacggattttctaagaaacttaaagtaaccaggactgttatctgtaccgattgtaaaggattgggcggcgtagctggttccgtagtgaaatgcagcgactgcaaaggtcgtggaatgatagttagggtgatgcaattagcgcctggaatgattcaacaagttcagtctccttgtggtgcctgtaaaggaactggtgaagtgattccggcgaaggaccgctgcaaaggatgtcaagggcaaaagaagcgcaaagtggaggaaatcctcgaagttcatgtggagaagggcatgaaggacggcgacaggatcatgttcgaaggtagaggagatgaagatcatgacgttccgcccggcgacatcgtaatcattcttgacgaaaaggatcaccatactttcttcaggaaggacgacaatcttgtaatgaatattgacattcagctcgttgaagcaatgtgcggattctcacgtgtaataaagactctcgatgacaggactctatttttcaacgtattgccaggcgaggtaattaagcactcggatatgcgggttatttacggcgaaggtatgccgcatcggaggaatcctacagagaagggcgatcttattctgcagttccgcgttgtattcccagataagctaactcctgaagctcggcggaaacttcaagatctattgcctggcaagagcgaatgtctggttggcgacgatgacgaggttttcgagttgaccgagatcgcgccgagtcgctcacgtcacgaggaccacatgggccacgaggagggcggagttcgttgtcagcaccaataa

SEQ ID NO: 397 - DNA, 1128 bp, Ancylostoma ceylanicum
atggattcccgtaacacaaaggaacatgcgaacatcgtcttcataacttcttatcttcacgcgccaattattttgatgagaatggcttctgtgacgctcaatccttcttatgtaaaggcttatgaggttctctccgatgaaaagaagcgacaaatatacgaccagggcggtgaagaagcccttcaaggtggaggcggtggaggagaattccacaatccattcgatgtcttcgacatgttcttcggaggaggaagacgtcaaagagagcgtggagttcgacctactgttcatcagatgaaggtttcgctggagcagctatataacggattttctaagaaacttaaagtaaccaggactgttatctgtaccgattgtaaaggattgggcggcgtagctggttccgtagtgaaatgcagcgactgcaaaggtcgtggaatgatagttagggtgatgcaattagcgcctggaatgattcaacaagttcagtctccttgtggtgcctgtaaaggaactggtgaagtgattccggcgaaggaccgctgcaaaggatgtcaagggcaaaagaagcgcaaagtggaggaaatcctcgaagttcatgtggagaagggcatgaaggacggcgacaggatcatgttcgaaggtagaggagatgaagatcatgacgttccgcccggcgacatcgtaatcattcttgacgaaaaggatcaccatactttcttcaggaaggacgacaatcttgtaatgaatattgacattcagctcgttgaagcaatgtgcggattctcacgtgtaataaagactctcgatgacaggactctatttttcaacgtattgccaggcgaggtaattaagcactcggatatgcgggttatttacggcgaaggtatgccgcatcggaggaatcctacagagaagggcgatcttattctgcagttccgcgttgtattcccagataagctaactcctgaagctcggcggaaacttcaagatctattgcctggcaagagcgaatgtctggttggcgacgatgacgaggttttcgagttgaccgagatcgcgccgagtcgctcacgtcacgaggaccacatgggccacgaggagggcggagttcgttgtcagcaccaataa

SEQ ID NO: 398 - DNA, 246 bp, Ancylostoma ceylanicum
atggtgaaggagacgaagtactatgacgttctcggcgtctcgcccaacgcaacggatagcgaactcaagaaagcgtaccgtaaattggcgctgaagtaccaccctgacaagaatcctgaaggtggcgagcagttcaagttgatatcacagtgccggttaattgtctttgcaccacagagtactatctctctgctctgccgcaccgcttaccactttatgacgtttagtattgccgtgccactatag

SEQ ID NO: 399 - DNA, 1179 bp, Ancylostoma ceylanicum
atgacgaccacctcagacgtgcccctcatttgtttcccatcccctgagacgtcgttcaccagggctttcatggaattcgtgaggaaatacgaaacgagatttgcttttatcgatccggagacaaaggagcgactggcgttttgggacttggacaatatattggaccaaattcgctatcaccttcaccaaagaggcgttgagaagggtacggtaatcgctacacattgcggcaattccattgatttcatcctgatgtgtatggcggcaatcgatctgggagcagtagtcgtaccgatgaatcctgcatcgacactttttgaaatcgataagtatctgaccgtgtgtgaggtcgaacacattgtaatcgagccggagtacgagcgaaagataaacgaactgctcgaacaaccgaaattcaagaaaatctccacaatacctcttgagaaactacgtggacttcaagaaaatgagaacgtcccgccaaaaatcgagacagacctccatggcgaggagacggccttcattttcttctcatccggcaccaccggcccaccaaaggcgatacgccatagtcaccgtaccctactggcacctctttgtcaagtcatgtccacgacactatcgcctacgaaatatccgatcccatcattgctgggtggcaaccgggtgcacggcgtgctaccgtactttcacgctggcggtcttattaccgtattctgcatgttggttgagggtgttacggtcgtgatcaataggaaatggaatcagtatggattccttcggatattaatggaataccaggtcaccatcatcaatatcgttccgccagtactggactttcttgtgaagcacccattggtcgactcattcgacctcagcaagttacggcttgttttcgttggtgctgctatgtgcgaggagaatcaaatacgcttgctgaaggagcgccttccggatatccaggacgtcgtgcagttgttcggtatgaccgaagctggtatgctgctgtttgccactcctacaggaaatacacgtctttcgtcggttggacgacctatgcctggagtggaagcggctgtaattggagaagacaagaaatgcctcgatttcggtgaagtgggagagctagttgttcgatcgccatccatgatggtaggatatttaggtctaaaggagtga

SEQ ID NO: 400 - DNA, 300 bp, Ancylostoma ceylanicum
atgatcaaagtgcgcggatggcaggtgaacccatacgagatagaagaagctatcaaatccaacgtcgatggtgtgaaggattgtgcagttgtcggtgtgaagtacgggagtgatggacatcgcccaaaagctttcgttgttggcgatgttgacaaggatgctgttaaggaatttgtgaaagagaaattcatttcgtataagcatttgtgtgcggttgaaatcgttgacgacataccgaagacgccttctggtaaaattatgcgcacaaagttggccggtgaagtaaatccgtacttgtga

SEQ ID NO: 401 - DNA, 927 bp, Ancylostoma ceylanicum
atgggccggattcgcgtcgtgcctgctgggagacgcgacgcggtgattccgccggtgtcggagcctggaatacgtcctggcctcactacacttatagagccgacttctggcaatactggtattgcacttggattggttgccgccgctcggggatatcgcctagtcatcaccatgccggctagcatgagcgttgaacgacgcacattattaaaagcatatggtgctgagcttgtgctgacagatcctgccctcgggatgaaaggggcgatcgagcgagctaatcagctgcgtgagaacatccccaacagttttattctcgctcagttcgataatccttcaaatccgatggttcactatgctactactggacctgaaatctggagacaaacgaatggcaaggtggatgcatgcgttttcggtataggaaccggggggacaatcaccggggtgggccaatatttgaaggagaagaaaccggaagtgaagatgtttgccgtagagcctgtcgaaagtgctgttcttagcggaaataagcctggtgcccatcgaatccaaggtattggtgcgggctttactcctactgtgttgaacacaggtatttatgatgatattgtcaccgtacattccgacgaagcaattgtcatggcaaagaggatggcactagaagaaggtcttctttgtggaatttcttccggagcaaatgtccatgctgcctgcaaggtggcttctcgtccagagatggctggaaagctcatagtgacattactaccaagcttcggagaacgctacctttcctcgccgctgtatgctaacatccgtgacgaggccgagggcatgggtgtgacctcccttgaagcagacctgagtcgagttcgtctacctcagttccctgtagaagagtgcactgactgtggctcaactcgttga

SEQ ID NO: 402 - DNA, 843 bp, Ancylostoma ceylanicum
atggttccttcacttgcactattcgccctatttgcttctacttatgctgatttttctccgtctttcaacgcattcttaacggacacatatggcaagggttttgctaatcgaatggcccgacgtgacatcggcccagatggaagcttcggaggtggcgatcatcagccaggctcgaggacctcacggcaagctgtggtcatagtgcacggaatcacgaacacagctggaagatttgcccatacgcggcagcatttgctcaatcaaggatggaaggagtcggaaatctacgcaacgacttacggcgacggtggcaagacggcagctcccatggtggacatgaagtgcgactatgtgaaacaagtgcgatggctgatacaggctgtggctgaattcacgagacgtcgagtcgacgtgattggctactcgatgggatcgcctgtggcccgaaaggcaattctcggtggaaaatgtgtggacaccggggaaaggctgggacccaagctcacggctctagtggacacgttcgtctcggttgctggtgcgaaccacggctcgttcttgtgtatcctgccttttcctggtgcgtgcaacatggtgaacggtctctcttgtcgttcaacgtttatccaaaacataaacggcagacagcgatacgagggtctccatgtgtactccatttattcgccgcaggacgataaagttggtttccggaacgcatgcggagaattaacgtcggctataggtggttccgaccaggagttccaaagacccggcaaccatgatgttgtgatggccgacaccgttcagctacaggcaaatctcatccaccggcatagcccatga

SEQ ID NO: 403 - DNA, 897 bp, Ancylostoma ceylanicum
atgacctctggacgagactacgttcgcgagaagatgcccattttgggttttggaacctatcagattcgtgatgagtctacgctccatggtgtagttgatgcagcgttatcgtgcggctaccgtttcttcgatactgctcaggtgtacgaaaatgaggctgcgttgggaaggatatttaaggagcttttgccgaaatatgacctggaaagagaagacattttcatcacatccaaggtatctccagccaatcaaggcacggatccggctaggaaatcgatcaaaaaaactcaatttcaatttcaattctgcaagtccctagcgaacctccaaaccgactacatcgacctaatgctgatccactggcctggaataagcaaagcagctgtatcagacaaacggaacccagtgaaacgacgacagacttacgaagtcctggaagaataccatgagtccggcgaacttcgagccatcggcgtgtccaactatgaaattcgacatctggaagagctgttggagcactgtaagattcatcctgctgtgaatcaggtggagttccatcctcatttccatcaactcgacttgttggagtactgcaaagcccatgacatccatttccaggcctacagcagcttgggaagcccggactaccgtgacgagctgttcaacgatccagaagtgcaacaactagccgcaaagtataaaatcaccgtgccacaatttctgctggcatgggcgacgtcacagtcgatcagcgtacttccgcgcacgacaaatcctgagcgagttgcgccgaactttgaggctaaggatgtgaagatctcgtcggatgacgtgcagaaactgctcgacaacgggatgtgtcataaggcttgttgggatcctagagtggttgtctga

SEQ ID NO: 404 - DNA, 2007 bp, Ancylostoma ceylanicum
atgtcaacagataatccacacccacgtgccgatcccttcaaacgacctctgaatcaagcaataactttacaattactcagagagcagctccaaaggttgctttctaaacttaatgtcgccgttcccgaaggcgatgctttcaaagtggttactgttgcattagaaccgcttatttcgtcatggaggaaacgagacgtacaatcggagagatatttaaagggactgctggtaatattggagtactgcctatcacattcaattgatgatcatcaatgtttcgaagcactagttacatcacttggttataacactgtacagttttggagagctgctgttccacacatattcgattcggatcttgcatttggaacaaagtatagggacgcgttactttttgcgctaaccctgtacgatgtaaatacaggcaaaaaccgtttacgggagctatacgctgcagtacctggtattcgaaagtcgcttctgggtgtgaatgccaaacagtttggcgagcgatttcaccatctgcaaaagaaaatctctcgacactcttctcttgccagtcttgagggaagtgaattagacgatgaagatgctcatcgatcgccaagaagatctcgcgagccttccgttcattcagaggatgaagaggagaacgagcctcgtattcccatgggaggaatcgccaacactcactttcaacaacgagttatcaatgtatcaaacgcaccaccggtatcgcttaaaagagagaaaactggcgattggaacatcaagcaaggatcaggaggtctggtgtcttgtgttgaccctgtgatgacgaaggatcatgagaacatttggctggcgaaccttgggatgaacttgaaggacaggaaaaaatccatgtcatctgaggactcggagtattcttcgatggctccttcaacaaatacactcggtttgccacttattaagcaagcaattgcagaggtgtttttccacgtgctcgcagacgacgacaagcctgaaaaagagtcgaatgctgaacagcgcaaagcaagggaagaaatgtcgctgctcggtgtactcaacaattacaatagaggcaattacaaattaaatccagttgttgtgcaagaagaagattacaacgtctactatggtggtatcagtaacggtctgctgtggcctgctctacataatctacctgagtatattgtggcagattacgactcaccaaaggttgtacgtgaccactggtgcgcatatgtgagagtcaattatcagtttgctattgatgctgtcaggaacagccgaccgcaggacttcatttggatccatgattatcatctaatgcttacgggaatgatcatgcagtcactggatccaaatctggaggtaggattcttcctccacatcccattccaacccccagaaaatttcttcactaaatatggcacatgtggattacctgtcctacgaggcttgctcaggtttacgaaggtcggcttccaaacacatcgagaccgtgccaaatacattgagctcgttcagaagcacttaaagggtgttactgttagccacgataaacattgggacattgacacagtgactcatgagggatggacgtgctcgttaggtgttttcccggtgagcatcaaaaatgatgatttcttgaaattcgtccacatgccagagaccgctgaaaaagcatccgtgataagaaaaaagataatgggtgaaaagcctccagcggatggaaagtttttcttctctgttgagcggttcgattatacgaaaggcattaaggagaagctgatcgcttataggcggtacttccagaaatatccggaacgtataggcaaggatgtcctgtatcaggttgccgtgaccaaccgacgttcagtggatacgtatcgcgtctatcaggatgaatgtttggatatagcaaggaaaattgtcgaagagttcaaggatccctcgagacccaagtggaaaccgctagtattccagacggatggtgagtag

SEQ ID NO: 405 - DNA, 327 bp, Ancylostoma ceylanicum
atgacgcgcatagcggtcgcttttctctgtattctatggagcggtgggataaacccaggagttgtatcggccgaggaaactatagaaaatggcgtagctgaaggctttgggattccacccttcagaaccaaaagagaaaacgacgaaacgatagtagagggcgacattatcgtgtcgaaaagagaagccagcgaaactttcggagatgccagtatgagtggaggacgcgagaaacgacaagccgcccttggaaaactacacggaaagtggctgggaggagtgaattacgtcttcaatgctagtgctagtaggtttattactaagtga

SEQ ID NO: 406 - DNA, 927 bp, Ancylostoma ceylanicum
atgacgcgcatagcggtcgcttttctctgtattctatggagcggtgggataaacccaggagttgtatcggccgaggaaactatagaaaatggcgtagctgaaggctttgggattccacccttcagaaccaaaagagaaaacgacgaaacgatagtagagggcgacattatcgtgtcgaaaagagaagccagcgaaactttcggagatgccagtatgagtggaggacgcgagaaacgacaagccgcccttggaaaactacacggaaagtggctgggaggagtgaattacgtcttcaatgctagtgctagtaaacggctggagaattgcttccgcaaggcagcagcggcatgggagcgagatacatgcattaatttcaggcagggcaaacctggcgattacatctttgtaactgaccttggctgttactcttcgtatgtcggaagaaaaggagggaagcagattctttcccttagaagctattgcgaagtagaacttggtaacgccattcacgagatcggacatgcactagggctctaccacaccagtagtaggtacgaccgcaacacctacataactgtcgaaccggatatagtagagaagtatccaaacgagttcagaatagttacaaatgaggaaagtgaaaattatgagacagaatacgactacggaagcgttatgcaccatacccagaatgttcattatccgataatgttccctgccgatgagaactatcgcagaaccatgggatctcacataatatcgttcacagacctctggttgatcaacaaacactatggatgtctaggttggataactagtctgaaaatggttgacctaaacttttgtccagtgccgacttgcgagatcattcttttctcgttgttcaagcgctttgaaatgcatttaacagaacgaagttgcccgtga

SEQ ID NO: 407 - DNA, 882 bp, Ancylostoma ceylanicum
atgacgcgcatagcggtcgcttttctctgtattctatggagcggtgggataaacccaggagttgtatcggccgaggaaactatagaaaatggcgtagctgaaggctttgggattccacccttcagaaccaaaagagaaaacgacgaaacgatagtagagggcgacattatcgtgtcgaaaagagaagccagcgaaactttcggagatgccagtatgagtggaggacgcgagaaacgacaagccgcccttggaaaactacacggaaagtggctgggaggagtgaattacgtcttcaatgctagtgctagtaaacggctggagaattgcttccgcaaggcagcagcggcatgggagcgagatacatgcattaatttcaggcagggcaaacctggcgattacatctttgtaactgaccttggctgttactcttcgtatgtcggaagaaaaggagggaagcagattctttcccttagaagctattgcgaagtagaacttggtaacgccattcacgagatcggacatgcactagggctctaccacaccagtagtaggtacgaccgcaacacctacataactgtcgaaccggatatagtagagaagtatccaaacgagttcagaatagttacaaatgaggaaagtgaaaattatgagacagaatacgactacggaagcgttatgcaccatacccagaatgttcattatccgataatgttccctgccgatgagaactatcgcagaaccatgggatctcacataatatcgttcacagacctctggttgatcaacaaacactatggatgtctagtgccgacttgcgagatcattcttttctcgttgttcaagcgctttgaaatgcatttaacagaacgaagttgcccgtga

SEQ ID NO: 408 - DNA, 639 bp, Ancylostoma ceylanicum
atgacgagttggagaacaggtaaacggctggagaattgcttccgcaaggcagcagcggcatgggagcgagatacatgcattaatttcaggcagggcaaacctggcgattacatctttgtaactgaccttggctgttactcttcgtatgtcggaagaaaaggagggaagcagattctttcccttagaagctattgcgaagtagaacttggtaacgccattcacgagatcggacatgcactagggctctaccacaccagtagtaggtacgaccgcaacacctacataactgtcgaaccggatatagtagagaagtatccaaacgagttcagaatagttacaaatgaggaaagtgaaaattatgagacagaatacgactacggaagcgttatgcaccatacccagaatgttcattatccgataatgttccctgccgatgagaactatcgcagaaccatgggatctcacataatatcgttcacagacctctggttgatcaacaaacactatggatgtctaggttggataactagtctgaaaatggttgacctaaacttttgtccagtgccgacttgcgagatcattcttttctcgttgttcaagcgctttgaaatgcatttaacagaacgaagttgcccgtga

SEQ ID NO: 409 - DNA, 594 bp, Ancylostoma ceylanicum
atgacgagttggagaacaggtaaacggctggagaattgcttccgcaaggcagcagcggcatgggagcgagatacatgcattaatttcaggcagggcaaacctggcgattacatctttgtaactgaccttggctgttactcttcgtatgtcggaagaaaaggagggaagcagattctttcccttagaagctattgcgaagtagaacttggtaacgccattcacgagatcggacatgcactagggctctaccacaccagtagtaggtacgaccgcaacacctacataactgtcgaaccggatatagtagagaagtatccaaacgagttcagaatagttacaaatgaggaaagtgaaaattatgagacagaatacgactacggaagcgttatgcaccatacccagaatgttcattatccgataatgttccctgccgatgagaactatcgcagaaccatgggatctcacataatatcgttcacagacctctggttgatcaacaaacactatggatgtctagtgccgacttgcgagatcattcttttctcgttgttcaagcgctttgaaatgcatttaacagaacgaagttgcccgtga

SEQ ID NO: 410 - DNA, 1929 bp, Ancylostoma ceylanicum
atgacgaacctcctcactgtcaccactggattatccggactcgtagcggcgctctttgtaacgtcgctggtcttcaatatccttatatggtcggaggttaacaaggaacaggagaagccgactccgatacctccaccagtgccacagtcgtcttccgttgtccacacaaccgtaactgaaccaaaatcgacgaaaccagtgtctaaaccgcagtcctcttcggttgtgcataccacggtaacagaatcgaagtcgactaaaacgactagaccagtgactaaaccgacaacaacagtgccaagcacgacgcgcacaagaatttcgacaaagagcacaacacgaaagagctcagcagtaacaactcctcgaactcttcgaccgtcaacaacaacgtcaacaagaaggcctttcaccacaactacggccgaacccgatattccgggtaatgacactgtgttctgcccacattatggtgtttccgataattcgtatgactaccaggaagcagcagcttacattctcagcggtctggacgaaaccgtcgatccatgcgaggatttctatgcgttcacttgcaataagtacataaaggagcacgatcctcaagaacttggcgtcggcaaattcagtccctccaaagaacttcaggacgatataaacgccgaaatagctgaagccctacgtacagtcgaagtgaacagtcagcagtggtcaaaaactgagaggataacgaaagctcttctgcacagctgcgtctatcaccgcacctccaggactccgattgacaacatgatcgattttctccaagaaattaaacgtttattcggaggtataccattcatcggtcacccgctcaaggatggcttcgatcttttcactgccatgggtgatctggaacagaatcacgccatgggtacgcttatgggtggtatggtttctgtcgactacaaaaaaatcagccagcatgcgctgtacatctcgcagccctctcttccaatgcccagagaattctacgtcctgccacagttcacaaagaagctgcaggaacgtgaaaagttgcttagagacgttctgttcaagtttgctgacaccattcttgatgatccagaaccgtatgcgaaggaaattaagaaagcagcgctagacatcgtccaactagagagaagaattgcgatggcatcgtggccaaagactcagctgagaaattatgcacagcagtacaatgcctacaagttgggagatctgaagaaaacgtatccaaaaatcaactgggagagctatctcaatgctctcatgtcaaccgccggcaaacctgatttctctggcagcgctagactcgtgatcgctcaaccatcatacttcggttggctcaatgcccttgtttctggaaacaccgtcgacgacaagatgctcgtcaattacatgatcactcagctaattttcgaagacgcagatttccttggcggtgtgttcaaaaaagcagcagaagaggctaactatgtaccgtacgctcaacgtgcaggcagaggaattgcacgtgtcggacaacaactgttccgaacggctgatagctctggtaacgccaacttgccgtgtatcagcaccatcatgcattacatgccatatggaccaggctatgtctatgtgaagaacaagggaaacgaaaggaatcaggtggctgcggatattagcaagcagacagaactcgtcctcaaaaacttcatgaacatgatgtccggcctgaaatggatgacaagcgattctaaacgggcggcgcaaatgaaggcaaatggaatggtgaagaactatctctggcctgaaaaattattcggtgacttcagggataccaggaagctcgatgattatcacaatatttgttggaagatttcacctatgcacattgcagccagactacggaaaaatcattga

SEQ ID NO: 411 - DNA, 1275 bp, Ancylostoma ceylanicum
atgcgtgtgattctcgccatactggctctcctcgagtgcactctgccggcagtgcataagatgcagcttagaaaaattacgccggaaatgataaaaatgttacgaaatggtacgtgggccaagtacatcgaaggaatgcggaaacagcgacaacacgctccgagaatggatggtgacgatgattataagcacgacataatcagctacaacgacattgagtatctcggcgaaatcacatttggaacgccagagcaaacattccgggtactcctggaaactagcacttcttatccctggatccccgacaaattgtgctaccagaaacccgacaggccatcagcatgtcaatcttcgcaatgtgacatcggattaatctgcgacgtgttctgcacagaaaagtcgtgttgcaatctaagaggaaaccacacaactgaagatccatgccgacgaaaacgccgcttcgatatggacagatctaacacctacataaaaaccgcaagaaaatttactacatggcgtaaaagatttgcacgaggcttcgatgggaacgatacttttcgttttggcgcagaaggagaggatcgacttgtgataccaggtgcgataattggccaagccgtaagaatcgatccatgcattgctcacgcgcattttgacggcgtaattggactaggattcgtattttcctcacctctgctccaagccattcggaaggggctcctagaccagccaatattcacagttttcttaaagcgaactagaagcgaagataatggatacggtggtatgatcacatacggcggatttgatttcgaaaattgtgaacaaccagtcacttatgaacccgtagacagcgttatgtattggcaagttaggcttctcggagtgtctgctggagaatatttcatggtaagcgatgcatggaaagcggaattagacactgctacttctttcataagaggaccagcggctatcatttcggctatagcgaaggagcttggggcacaatacgacctgtcgaatgacctatacttcatcgaatgcgacgctccagcagcagtgaagttcctgattggcacaatgcagtacacggtcggagcaaaaaacctcatcattgaagtgcaagagaacctttgcatcttggctctatcacgatcatcaagtccagaagatccaccacaatggatatttggctatccattcattcgtgagtattgtcatgtttttgacatgagcgcaaggaaagtcggatttgcgaaagcacgtcaggactga

SEQ ID NO: 412 - DNA, 1515 bp, Ancylostoma ceylanicum
atgcgtgtgattctcgccatactggctctcctcgagtgcactctgccggcagtgcataagatgcagcttagaaaaattacgccggaaatgataaaaatgttacgaaatggtacgtgggccaagtacatcgaaggaatgcggaaacagcgacaacacgctccgagaatggatggtgacgatgattataagcacgacataatcagctacaacgacattgagtatctcggcgaaatcacatttggaacgccagagcaaacattccgggtactcctggaaactagcacttcttatccctggatccccgacaaattgtgctaccagaaacccgacaggccatcagcatgtcaatcttcgcaatgtgacatcggattaatctgcgacgtgttctgcacagaaaagtcgtgttgcaatctaagaggaaaccacacaactgaagatccatgccgacgaaaacgccgcttcgatatggacagatctaacacctacataaaaaccgcaagaaaatttactacatggcgtaaaagatttgcacgaggcttcgatgggaacgatacttttcgttttggcgcagaaggagaggatcgacttgtgataccaggtgcgataattggccaagccgtaagaatcgatccatgcattgctcacgcgcattttgacggcgtaattggactaggattcgtattttcctcacctctgctccaagccattcggaaggggctcctagaccagccaatattcacagttttcttaaagcgaactagaagtgacaaaacggtagacaacgggcggcagtacttgatagcgaagaaagcagcgaaggagactgtgatcgccacaaaggctgcacactacgatgagcaaggagttagagaaaaagatggcagcgaacgtctcatctgcctgcttgtgaggtcttcccagcggcaggtcgaagatgtagaaaagttttacagaactaacgacgaacacggtcacctcataatagaccgcaagaaggcaaaaggcgaagataatggatacggtggtatgatcacatacggcggatttgatttcgaaaattgtgaacaaccagtcacttatgaacccgtagacagcgttatgtattggcaagttaggcttctcggagtgtctgctggagaatatttcatggtaagcgatgcatggaaagcggaattagacactgctacttctttcataagaggaccagcggctatcatttcggctatagcgaaggagcttggggcacaatacgacctgtcgaatgacctatacttcatcgaatgcgacgctccagcagcagtgaagttcctgattggcacaatgcagtacacggtcggagcaaaaaacctcatcattgaagtgcaagagaacctttgcatcttggctctatcacgatcatcaagtccagaagatccaccacaatggatatttggctatccattcattcgtgagtattgtcatgtttttgacatgagcgcaaggaaagtcggatttgcgaaagcacgtcaggactga

SEQ ID NO: 413 - DNA, 219 bp, Ancylostoma ceylanicum
atgagactactggtattcatcttcgctctgctggctattgccttctcactggatgagatatgcaagaaggaactggagactgggccatgccgggcagcgttcagaaaatatggatactccacgaaagaaagcaaatgcgttcagttcatatacggcggttgcaaaggaaacgagaacaactttgaaaccatggaggagtgccaaaagaagtgtgcataa

SEQ ID NO: 414 - DNA, 390 bp, Ancylostoma ceylanicum
atggtgcggtacagattcgacatctgcgttcccatctgcatcgaactgtgcatagattattgggaaaatgatcaaacatactacatctttggaaacgagacggagataaaatacgaaatcatgacaagaggaccagtggtagcgacgtacaaagtttatcgggacttcgattactacaagaaaggagtttatatccacagggaaggcgaggtgaccggtttacatgctgtaaaaattattggctggggtaaagaaaatgatgttccttactggttggtcgcaaactcctggaacacagattggggagataatggttatttccgcatcctgcgtggagagaaccattgcgatatagaaaaagcagtggtggttggagtacctagagtgtga

SEQ ID NO: 415 - DNA, 351 bp, Ancylostoma ceylanicum
atgaaacaccttcgcgctccattacgagatgatcaaacatactacatctttggaaacgagacggagataaaatacgaaatcatgacaagaggaccagtggtagcgacgtacaaagtttatcgggacttcgattactacaagaaaggagtttatatccacagggaaggcgaggtgaccggtttacatgctgtaaaaattattggctggggtaaagaaaatgatgttccttactggttggtcgcaaactcctggaacacagattggggagataatggttatttccgcatcctgcgtggagagaaccattgcgatatagaaaaagcagtggtggttggagtacctagagtgtga

SEQ ID NO: 416 - DNA, 384 bp, Ancylostoma ceylanicum
atgatcttctgctttttaatggatggcgctagcgagatgtcacaccaaccggcttcctctgatgatcaaacatactacatctttggaaacgagacggagataaaatacgaaatcatgacaagaggaccagtggtagcgacgtacaaagtttatcgggacttcgattactacaagaaaggagtttatatccacagggaaggcgaggtgaccggtttacatgctgtaaaaattattggctggggtaaagaaaatgatgttccttactggttggtcgcaaactcctggaacacagattggggagataatggttatttccgcatcctgcgtggagagaaccattgcgatatagaaaaagcagtggtggttggagtacctagagtgtga

SEQ ID NO: 417 - DNA, 225 bp, Ancylostoma ceylanicum
atgaagttcctagttttcctgctctgcgttttcctcttgtgcgaagctcaacaggactcaagatgtgtgcgacccgtcattggaccaaaatgtaggatcttgctgaaacgatgggcttacaacccgaacgagaacaagtgcgagctgttcgattacggaggctgcggaggcaccgaaaacaacttcgagaacgaagaagactgtaaaaacacctgcgtcgtatga

SEQ ID NO: 418 - DNA, 591 bp, Ancylostoma ceylanicum
atggcggaaatcatgaatagtccccacaacctcataacacaaactaatacaagctcaactggtcaaaaactggaagcaaaagttcagcttagtcgccctaggcgccaggcgcagaggtggaaaaatggagtggtggggtccaggactataaactactggttcaataacaatctcggtcatgatatgcagttgatgttcatgagtgcgacacaagcttgggcgaaggatacctgtcttacatttaaaaacaaccacagtgtgggtagtgtgcaagtggggttcttcagcagaggtggctgctaccaccaaacccactcgagagggtcatggttgaacgctggttgcggccaactcggacagattacacacgaactcggacatgcgcttggtcttgggcacacccataacagacacgatcgcgacaactacatcgtggtggattggggaaatgttgatagaggtttctatgacatcgccaggatgaatccaggaatgaaacttgaggtctataggaaccagtacagacctatgacgacacaggaaaacgacaactacgatgttccgtacgactatggaagcattatgcactag

SEQ ID NO: 419 - DNA, 555 bp, Ancylostoma ceylanicum
atgacactgctcctactcgttttactaatttatctagaagcaaaagttcagcttagtcgccctaggcgccaggcgcagaggtggaaaaatggagtggtggggtccaggactataaactactggttcaataacaatctcggtcatgatatgcagttgatgttcatgagtgcgacacaagcttgggcgaaggatacctgtcttacatttaaaaacaaccacagtgtgggtagtgtgcaagtggggttcttcagcagaggtggctgctaccaccaaacccactcgagagggtcatggttgaacgctggttgcggccaactcggacagattacacacgaactcggacatgcgcttggtcttgggcacacccataacagacacgatcgcgacaactacatcgtggtggattggggaaatgttgatagaggtttctatgacatcgccaggatgaatccaggaatgaaacttgaggtctataggaaccagtacagacctatgacgacacaggaaaacgacaactacgatgttccgtacgactatggaagcattatgcactag

SEQ ID NO: 420 - DNA, 522 bp, Ancylostoma ceylanicum
atggaagcaaaagttcagcttagtcgccctaggcgccaggcgcagaggtggaaaaatggagtggtggggtccaggactataaactactggttcaataacaatctcggtcatgatatgcagttgatgttcatgagtgcgacacaagcttgggcgaaggatacctgtcttacatttaaaaacaaccacagtgtgggtagtgtgcaagtggggttcttcagcagaggtggctgctaccaccaaacccactcgagagggtcatggttgaacgctggttgcggccaactcggacagattacacacgaactcggacatgcgcttggtcttgggcacacccataacagacacgatcgcgacaactacatcgtggtggattggggaaatgttgatagaggtttctatgacatcgccaggatgaatccaggaatgaaacttgaggtctataggaaccagtacagacctatgacgacacaggaaaacgacaactacgatgttccgtacgactatggaagcattatgcactag

SEQ ID NO: 421 - DNA, 399 bp, Ancylostoma ceylanicum
atgtttcttttaggaaagtgtcctgatgatcccaaaacagcaacatgtgagcatcagggatttcctaacccgaaaaactgcagcgtttgcgtttgtccgggaggctacggagggcgatcctgtggagataggccaggtgattgtggccaggagctgcttgcacaggattattggcaaccgatggttttgaatatttctagcccccaaaattccagtgaatatttcgtatgcacgagctggattaaatctgcgcccaaaaagacaatcgaggtcgaaattgagagcatttctgatgatttaaaaacatatggatgcggttatgcagcagtagaaatcaagtcacaagatgaccaaagactaaccggctataggtatgagaatcgctatctatcttcgtaa

SEQ ID NO: 422 - DNA, 306 bp, Ancylostoma ceylanicum
atggaatgggacaacattgagaaggagtacagagaaaactacaaggagtacctcgaaaacaaaagagattcagttgtgaaggaactaatcgagcgttataaaaaggaatatggtaagaaggagagcgaccatcacggagtgccctatgattatgggagtataatgcactatggcactgctgataaaaacccgccaatgactccgacaaattcaaattacaaaagaaccatgggctcacaattcatttcgttcacggatctgctagaagtcaacaaacgccatgattgccttggtatgacaacatga

SEQ ID NO: 423 - DNA, 678 bp, Ancylostoma ceylanicum
atggaatgggacaacattgagaaggagtacagagaaaactacaaggagtacctcgaaaacaaaagagattcagttgtgaaggaactaatcgagcgttataaaaaggaatatggtaagaaggagagcgaccatcacggagtgccctatgattatgggagtataatgcactatggcactgctgataaaaacccgccaatgactccgacaaattcaaattacaaaagaaccatgggctcacaattcatttcgttcacggatctgctagaagtcaacaaacgccatgattgccttggaaagtgtcctgatgatcccaaaacagcaacatgtgagcatcagggatttcctaacccgaaaaactgcagcgtttgcgtttgtccgggaggctacggagggcgatcctgtggagataggccaggtgattgtggccaggagctgcttgcacaggattattggcaaccgatggttttgaatatttctagcccccaaaattccagtgaatatttcgtatgcacgagctggattaaatctgcgcccaaaaagacaatcgaggtcgaaattgagagcatttctgatgatttaaaaacatatggatgcggttatgcagcagtagaaatcaagtcacaagatgaccaaagactaaccggctataggtatgagaatcgctatctatcttcgtaa

SEQ ID NO: 424 - DNA, 3792 bp, Ancylostoma ceylanicum
atgatatctacttctgggaaggatgaaatgacaccctgtcctaggaagaatgatactattggaatggtgggacaagcatgcatacacgataccgactgtccactctatccacaacagcagtgcctagacgggaaatgccttgcgatcggtggaaaatgccggtatgatgcggactgcccaaactccaaatatactcgctgtgtggaatcgcaatgtataaggatagggcagcaatgtagcagtgacgaggaatgtccattatacccgcacaccgagtgcatctattccacatgctctttggcacgagcgtcatgtaaaacagatcgtgattgtcctcaaactcctcccagagaatgtgtgcgttctgtgtgcattaagcgcaaacactgtagcaaagatttgcgttgtcctttccatcctgaaaatcaatgtctgggaacccaatgctgcaagccaggagcacagtgctctaatgacgtccaatgcaaaaaggaaggaaatcgtttctgtgtgaataatgtttgcataaggcttgacctttcctgtaccaaggaccaggactgtcccttctaccctcatactcaatgtattaattcagcatgtgtaaaggtgggaaaagcatgcacaaacgatcgcgactgtacactctatccacaacagcagtgcctagacgggaaatgtctcgcgatcggtggaaaatgccggtatgatgcggactgcccaaactccaaatatactcgctgtgtggaatcgcaatgtataaggatagggcagcaatgtagcagtgacgaggaatgtccattatacccgcacaccgagtgcatctattccacatgctctttggcacgagcgtcatgtaaaacagatcgtgattgtcctcaaactcctcccagagaatgtgtgcgttctgtgtgcattaagcgcaaacactgtagcaaagatttgcgttgtcctttccatcctgaaaatcaatgtctgggaacccaatgctgcaagccaggagcacagtgctctaatgacgtccaatgcaaaaaggaaggaaaccgtttctgtgtgaataatgtttgcataaggcttgacctttcctgtaccaaggaccaggactgtcccttctaccctcatactcaatgtattaattcagcatgtgtaaaggtgggaaaagcatgcacaaacgatcgcgactgtacactctatccacaacagcagtgcctagacgggaaatgtctcgcgatcggtggaaaatgccggtatgatgcggactgcccaaactccaaatatactcgctgtgtggaatcgcaatgtataaggatagggcagcaatgtagcagtgacgaggaatgtccattatacccgcacaccgagtgcatctattccacatgctctttggcacgagcgtcatgtaaaacagatcgtgattgtcctcaaactcctcccagagaatgtgtgcgttctgtgtgcattaagcgcaaacactgtagcaaagatttgcgttgtcctttccatcctgaaaatcaatgtctgggaacccaatgctgcaagccaggagcacagtgctctaatgacgtccaatgcaaaaaggaaggaaatcgtttctgtgtgaataatgtttgcataaggcttgacctttcctgtaccaaggaccaggactgtcccttctaccctcatactcaatgtattaattcagcatgtgtaaaggtgggaaaagcatgcacaaacgatcgcgactgtacactctatccacaacagcagtgcctagacgggaaatgtctcgcgatcggtggaaaatgccggtatgatgcggactgcccaaactccaaatatactcgctgtgtggaatcgcaatgtataaggatagggcagcaatgtagcagtgacgaggaatgtccattatacccgcacaccgagtgcatctattccacatgctctttggcacgagcgtcatgtaaaacagatcgtgattgtcctcaaactcctcccagagaatgtgtgcgttctgtgtgcattaagcgcaaacactgtagcaaagatttgcgttgtcctttccatcctgaaaatcaatgtctgggaacccaatgctgcaagccaggagcacagtgctctaatgacgtccaatgcaaaaaggaaggaaatcgtttctgtgtgaataatgtttgcataaggcttgacctttcctgtaccaaggaccaggactgtcccttctaccctcatactcaatgtattaattcagcatgtgtaaaggcgggaaaagcatgcacaaacgatcgcgactgtacactctatccacaacagcagtgcctagacgggaaatgtctcgcgatcggtggaaaatgccggtatgatgcggactgcccaaactccaaatatactcgctgtgtggaatcgcaatgtataaggatagggcagcaatgtagcagtgacgaagaatgtccattatacccgcacaccgagtgcatctattccaaatgctctttggcacgagcatcatgtaaaacagatcgtgattgtcctcaaactcctcccagagaatgtgtgcgttctgtgtgcattaagcgcaaacactgtagcagagatttgcgttgtcctttccatcctgaaaatcaatgtctgggaacccagtgctgcaagccaggaagaaagtgctctaatgacgtccaatgcaaaagggaaggaaatcgtttctgcgtgaataatttttgcataaggcttgacctttcctgtaccaaggaccaggactgtccctactacccgagtactcaatgtatcaattcagtatgtgtgaaggtgggacaagcatgtacaagcgatcgcgactgtccactctatccacagttgcagtgcctagacgggaaatgtctcacgatcggtggaaaatgccggtatgatgaggactgcccgaacttcaaacatactcgctgtgtgcaatcgcaatgtataaggataggtcagcaatgtagcagtgacgaggaatgtccattatacccccacaccgaatgcatatattccaaatgctctttggcacgagcgtcatgtaaaacagatcgtgattgtcctcaaactcctcccagagaatgtgtgcgttctgtgtgcattaagcgcaaacactgtagcagagatttgcgttgtcctttccatcctgaaaatcaatgtctgggaacccagtgctgcaagccgggctcacagtgctctaatgacgtccaatgcaaaaaggagggaaatcgttactgtgtgaataatgtttgcataaggcttgacctttcctgtaccagggaccaggactgtccctactacccgagtactgtctgtgtgagccagcgttgcattaagacagctaatgatactacaacacgccaaacaaggccatcttcgacacctgcgccatctcgtacacaacctacagctacacgtccgacgacttctcgaccatgtaccaatggctgcccacatgtgcctagaccgcccaggcctccttgccgcccaggctgcgtcaataagcctaggcctcccaagcctggtcatcatcagcatggatctcataggcctgggcctgatgggcataggcctcacaagccgggtcatcatgggtcagggcctcatgggcccaggcctcacagacctccttgcaaacctgattgttttgaccgaccaaagcctccctatcctccctgtgcacggggctgtgacggccgaggtcatccgtgcaggaaaagatgccatcatggaagaaggcatggatgttcagggcgaaaacacaaatgtcgaacgccattgtcaggtcaggaacgtcagaactaa

SEQ ID NO: 425 - DNA, 2745 bp, Ancylostoma ceylanicum
atgtttcagattcctgatgcatttgtgaacatcactaacatcaccatcggatctgtacatctctattcgccttgcacttacgaatggcaatgcacgaaatcccttggaactcactgcattcatggttactgtgtgaagcccggaaaaaagtgcagaacagatgccgattgccctcccagctcagatgcgcagtgtatctatggacagtgtcttcaaatttccgtcacatgcagttcggattcggactgcccttttaatcctctgacggtttgtagaaacttcatctgcatgaaagatgacggcagaccgtctgatcaaaacaacaaacgagatcctctctcctgcgtcaccgacacagattgccgctctcatggaaatatgctttgtataggaaattattgcagaaaactcggcgcattctgcgcacgcgatgcagattgcggtttcgtaagccgtataatgtgtatgaattctcgatgtgtcaaaagggaatcctgcagaatagatcaagactgtccggggtatcctctatcaatgtgcatcagttcacgctgtgctatgtcgcccttctgtcgaagtgattctgaatgcatggaatttccacagacatactgtgtcgactcctattgcagaaaactcgggcaatcatgccgagtagattctgactgtccccttgatcccacggtgtactgtcttgacaacaaatgctcaaaactcggacaaccgtgtagaatagacagtgattgccccacagctccagatattagctgtctacaaggaacctgcgtcaagcttggtcaaatgtgcctcgtggacacggactgcaaatatcatccttcaacgttctgttatgaattacgatgtgagaaagtattatcgtgtatggtggactccgactgtaaacgctacgcccagacgtcttgtattgactcgaagtgcaggaagatgggacagtcttgtaaaaaggatagggattgtccggcctatccaaaaaccgtgtgtattgactcgcaatgcaggaagttcctctcttgtagagtggaccgagaatgcccaggatatccacggaatgcatgcatagaatcaaaatgcctgccagtactgcagcgttgcagctcggatgtcgattgcccgcactaccctcacaccaagtgcatcggatcgaaatgtgtcaaacttggccaggaatgctcaacctctgctgactgtccataccagcctcacacaatttgccgcaactcacgttgcgataagggagatggcacgggaaccagcgacaggacagtagggaccatccatctacgttcctgcaagagagacgacgactgcgcgtactatcgagatgctgtttgtatgcgtagttattgcatcaatccaggaaaatcgtgcagtaacgatgctggctgtcctcgctatccgcagtcgcagtgcatttacgcaagctgtttggacattgctgcgcataagtgtacgagggacgaggactgtccttattatcccctcacaggatgtgaaaattcacgttgtatgagactggatagctgtcgaacgaatgccgactgctcctcgtaccagagcagagtgtgtgtcagtggacggtgttcgaaacgaagttcttgcagcgtcgactcagattgtcccgccaatagcatatgtgtgaaatctgagtgtgtggatttggaccagtcctgcaatggggactcagactgccctggttacccccgagcccagtgcgtgaactacagatgcaagaaggcgaccacatgtgcgaacgataatgattgcacggaaccgtactcgcgctgcattgacgggatgtgtagaacacttggacaggagtgcgatcgagacagggactgcaagtactacccgcaggtgaaatgcatcaattcacaatgtaccaaggttggacagagttgtgagagagacacagactgtccggattatcccgaaacagtgtgcataaataatagctgcaaaaagatgggtgcctgttctagtgatagcgactgtcccggctatccacaatcggcatgcgtggacaagcgatgtcagaaagttggacaaaattgcgacgaggatgaagactgtccgcaaccgttgtactgtgtcaatcacaagtgttccgcagaaatcgggaagcaatgcacagaagacagcgattgtcccagcttcccacacactcgctgcatcaaatcaaagtgcgcaaaaatgggcttgtcgtgcaactacgacgaggactgtccggatttcccatacacagagtgtaagaactcgaagtgtgcgaaggtggaaccgtcgtgcacaaaagataaggactgcccacaaaatcctgccagagaatgcgtgtcatccctatgcatcaaacgacgcacgtgcacacgtaacgctgactgtcctttccatccggaaaataaatgtctcaacacccattgctgcacaataggaagccgctgcaataacgaccgtcaatgccaagacgaaggatatcgttggtgtgtaaggggtcgttgtataagacttgatctaccatgctatctggatgaggattgtccatatcatccagatacggtgtgtcgtaatgaacagtgtgtaaaacgagagaagacgacgacaactacaactacaaccactactactccatcaactccctcaccctggggacccacgtgccgaaggaagtgctctgattggtgtcgatgtggctgtcagtccctatgtggtggatatcatgggaaacgctga

SEQ ID NO: 426 - DNA, 2859 bp, Ancylostoma ceylanicum
atggcaattcccttcagttgtgccctagcgatccaagctctgggtatcctttggagtttgctgtgctgttcagccttttcttctttcgacaagtacagagaaatcaatacagcttcctttaagattcctgatgcatttgtgaacatcactaacatcaccatcggatctgtacatctctattcgccttgcacttacgaatggcaatgcacgaaatcccttggaactcactgcattcatggttactgtgtgaagcccggaaaaaagtgcagaacagatgccgattgccctcccagctcagatgcgcagtgtatctatggacagtgtcttcaaatttccgtcacatgcagttcggattcggactgcccttttaatcctctgacggtttgtagaaacttcatctgcatgaaagatgacggcagaccgtctgatcaaaacaacaaacgagatcctctctcctgcgtcaccgacacagattgccgctctcatggaaatatgctttgtataggaaattattgcagaaaactcggcgcattctgcgcacgcgatgcagattgcggtttcgtaagccgtataatgtgtatgaattctcgatgtgtcaaaagggaatcctgcagaatagatcaagactgtccggggtatcctctatcaatgtgcatcagttcacgctgtgctatgtcgcccttctgtcgaagtgattctgaatgcatggaatttccacagacatactgtgtcgactcctattgcagaaaactcgggcaatcatgccgagtagattctgactgtccccttgatcccacggtgtactgtcttgacaacaaatgctcaaaactcggacaaccgtgtagaatagacagtgattgccccacagctccagatattagctgtctacaaggaacctgcgtcaagcttggtcaaatgtgcctcgtggacacggactgcaaatatcatccttcaacgttctgttatgaattacgatgtgagaaagtattatcgtgtatggtggactccgactgtaaacgctacgcccagacgtcttgtattgactcgaagtgcaggaagatgggacagtcttgtaaaaaggatagggattgtccggcctatccaaaaaccgtgtgtattgactcgcaatgcaggaagttcctctcttgtagagtggaccgagaatgcccaggatatccacggaatgcatgcatagaatcaaaatgcctgccagtactgcagcgttgcagctcggatgtcgattgcccgcactaccctcacaccaagtgcatcggatcgaaatgtgtcaaacttggccaggaatgctcaacctctgctgactgtccataccagcctcacacaatttgccgcaactcacgttgcgataagggagatggcacgggaaccagcgacaggacagtagggaccatccatctacgttcctgcaagagagacgacgactgcgcgtactatcgagatgctgtttgtatgcgtagttattgcatcaatccaggaaaatcgtgcagtaacgatgctggctgtcctcgctatccgcagtcgcagtgcatttacgcaagctgtttggacattgctgcgcataagtgtacgagggacgaggactgtccttattatcccctcacaggatgtgaaaattcacgttgtatgagactggatagctgtcgaacgaatgccgactgctcctcgtaccagagcagagtgtgtgtcagtggacggtgttcgaaacgaagttcttgcagcgtcgactcagattgtcccgccaatagcatatgtgtgaaatctgagtgtgtggatttggaccagtcctgcaatggggactcagactgccctggttacccccgagcccagtgcgtgaactacagatgcaagaaggcgaccacatgtgcgaacgataatgattgcacggaaccgtactcgcgctgcattgacgggatgtgtagaacacttggacaggagtgcgatcgagacagggactgcaagtactacccgcaggtgaaatgcatcaattcacaatgtaccaaggttggacagagttgtgagagagacacagactgtccggattatcccgaaacagtgtgcataaataatagctgcaaaaagatgggtgcctgttctagtgatagcgactgtcccggctatccacaatcggcatgcgtggacaagcgatgtcagaaagttggacaaaattgcgacgaggatgaagactgtccgcaaccgttgtactgtgtcaatcacaagtgttccgcagaaatcgggaagcaatgcacagaagacagcgattgtcccagcttcccacacactcgctgcatcaaatcaaagtgcgcaaaaatgggcttgtcgtgcaactacgacgaggactgtccggatttcccatacacagagtgtaagaactcgaagtgtgcgaaggtggaaccgtcgtgcacaaaagataaggactgcccacaaaatcctgccagagaatgcgtgtcatccctatgcatcaaacgacgcacgtgcacacgtaacgctgactgtcctttccatccggaaaataaatgtctcaacacccattgctgcacaataggaagccgctgcaataacgaccgtcaatgccaagacgaaggatatcgttggtgtgtaaggggtcgttgtataagacttgatctaccatgctatctggatgaggattgtccatatcatccagatacggtgtgtcgtaatgaacagtgtgtaaaacgagagaagacgacgacaactacaactacaaccactactactccatcaactccctcaccctggggacccacgtgccgaaggaagtgctctgattggtgtcgatgtggctgtcagtccctatgtggtggatatcatgggaaacgctga

SEQ ID NO: 427 - DNA, 246 bp, Ancylostoma ceylanicum
  modified_base (170)..(170): a, c, t, g, unknown or other
atggcaattcccttcagttgtgccctagcgatccaagctctgggtatcctttggagtttgctgtgctgttcagccttttcttctttcgacaagtacagagaaatcaatacagcttcctttaagggtcacgactcggagcacccttcacgtctaactcgcagcctctcaanaaaaacctcaatgtcggacgagtgttgcctagttggatcgccacctagcaaagccaacggagcagcgtgtgactag

SEQ ID NO: 428 - DNA, 2973 bp, Ancylostoma ceylanicum
atggcaattcccttcagttgtgccctagcgatccaagctctgggtatcctttggagtttgctgtgctgttcagccttttcttctttcgacaagtacagagaaatcaatacagcttcctttaagattcctgatgcatttgtgaacatcactaacatcaccatcggatctgtacatctctattcgccttgcacttacgaatggcaatgcacgaaatcccttggaactcactgcattcatggttactgtgtgaagcccggaaaaaagtgcagaacagatgccgattgccctcccagctcagatgcgcagtgtatctatggacagtgtcttcaaatttccgtcacatgcagttcggattcggactgcccttttaatcctctgacggtttgtagaaacttcatctgcatgaaagatgacggcagaccgtctgatcaaaacaacaaacgagatcctctctcctgcgtcaccgacacagattgccgctctcatggaaatatgctttgtataggaaattattgcagaaaactcggcgcattctgcgcacgcgatgcagattgcggtttcgtaagccgtataatgtgtatgaattctcgatgtgtcaaaagggaatcctgcagaatagatcaagactgtccggggtatcctctatcaatgtgcatcagttcacgctgtgctatgtcgcccttctgtcgaagtgattctgaatgcatggaatttccacagacatactgtgtcgactcctattgcagaaaactcgggcaatcatgccgagtagattctgactgtccccttgatcccacggtgtactgtcttgacaacaaatgctcaaaactcggacaaccgtgtagaatagacagtgattgccccacagctccagatattagctgtctacaaggaacctgcgtcaagcttggtcaaatgtgcctcgtggacacggactgcaaatatcatccttcaacgttctgttatgaattacgatgtgagaaagtattatcgtgtatggtggactccgactgtaaacgctacgcccagacgtcttgtattgactcgaagtgcaggaagatgggacagtcttgtaaaaaggatagggattgtccggcctatccaaaaaccgtgtgtattgactcgcaatgcaggaagttcctctcttgtagagtggaccgagaatgcccaggatatccacggaatgcatgcatagaatcaaaatgcctgccagtactgcagcgttgcagctcggatgtcgattgcccgcactaccctcacaccaagtgcatcggatcgaaatgtgtcaaacttggccaggaatgctcaacctctgctgactgtccataccagcctcacacaatttgccgcaactcacgttgcgataagggagatggcacgggaaccagcgacaggacagtagggaccatccatctacgttcctgcaagagagacgacgactgcgcgtactatcgagatgctgtttgtatgcgtagttattgcatcaatccaggaaaatcgtgcagtaacgatgctggctgtcctcgctatccgcagtcgcagtgcatttacgcaagctgtttggacattgctgcgcataagtgtacgagggacgaggactgtccttattatcccctcacaggatgtgaaaattcacgttgtatgagactggatagctgtcgaacgaatgccgactgctcctcgtaccagagcagagtgtgtgtcagtggacggtgttcgaaacgaagttcttgcagcgtcgactcagattgtcccgccaatagcatatgtgtgaaatctgagtgtgtggatttggaccagtcctgcaatggggactcagactgccctggttacccccgagcccagtgcgtgaactacagatgcaagaaggcgaccacatgtgcgaacgataatgattgcacggaaccgtactcgcgctgcattgacgggatgtgtagaacacttggacaggagtgcgatcgagacagggactgcaagtactacccgcaggtgaaatgcatcaattcacaatgtaccaaggttggacagagttgtgagagagacacagactgtccggattatcccgaaacagtgtgcataaataatagctgcaaaaagatgggtgcctgttctagtgatagcgactgtcccggctatccacaatcggcatgcgtggacaagcgatgtcagaaagttggacaaaattgcgacgaggatgaagactgtccgcaaccgttgtactgtgtcaatcacaagtgttccgcagaaatcgggaagcaatgcacagaagacagcgattgtcccagcttcccacacactcgctgcatcaaatcaaagtgcgcaaaaatgggcttgtcgtgcaactacgacgaggactgtccggatttcccatacacagagtgtaagaactcgaagtgtgcgaaggtggaaccgtcgtgcacaaaagataaggactgcccacaaaatcctgccagagaatgcgtgtcatccctatgcatcaaacgacgcacgtgcacacgtaacgctgactgtcctttccatccggaaaataaatgtctcaacacccattgctgcacaataggaagccgctgcaataacgaccgtcaatgccaagacgaaggatatcgttggtgtgtaaggggtcgttgtataagacttgatctaccatgctatctggatgaggattgtccatatcatccagatacggtgtgtcgtaatgaacagtgtgtaaaacgagagaagacgacgacaactacaactacaaccactactactccatcaactccctcaccctggggacccacgtgccgaaggaagtgctctgctttgacccggggaaaacgtcgtactggacccttgcgtccttcgtgggctcagattggtgtcgatgtggctgtcagtccctatgtggtggatatcatgggaaacgctgagcctcattcaaaccaacacgtgagatcattcacccgtttcaaaggcctaaagaaattgtga

SEQ ID NO: 429 - DNA, 2859 bp, Ancylostoma ceylanicum
atgtttcagattcctgatgcatttgtgaacatcactaacatcaccatcggatctgtacatctctattcgccttgcacttacgaatggcaatgcacgaaatcccttggaactcactgcattcatggttactgtgtgaagcccggaaaaaagtgcagaacagatgccgattgccctcccagctcagatgcgcagtgtatctatggacagtgtcttcaaatttccgtcacatgcagttcggattcggactgcccttttaatcctctgacggtttgtagaaacttcatctgcatgaaagatgacggcagaccgtctgatcaaaacaacaaacgagatcctctctcctgcgtcaccgacacagattgccgctctcatggaaatatgctttgtataggaaattattgcagaaaactcggcgcattctgcgcacgcgatgcagattgcggtttcgtaagccgtataatgtgtatgaattctcgatgtgtcaaaagggaatcctgcagaatagatcaagactgtccggggtatcctctatcaatgtgcatcagttcacgctgtgctatgtcgcccttctgtcgaagtgattctgaatgcatggaatttccacagacatactgtgtcgactcctattgcagaaaactcgggcaatcatgccgagtagattctgactgtccccttgatcccacggtgtactgtcttgacaacaaatgctcaaaactcggacaaccgtgtagaatagacagtgattgccccacagctccagatattagctgtctacaaggaacctgcgtcaagcttggtcaaatgtgcctcgtggacacggactgcaaatatcatccttcaacgttctgttatgaattacgatgtgagaaagtattatcgtgtatggtggactccgactgtaaacgctacgcccagacgtcttgtattgactcgaagtgcaggaagatgggacagtcttgtaaaaaggatagggattgtccggcctatccaaaaaccgtgtgtattgactcgcaatgcaggaagttcctctcttgtagagtggaccgagaatgcccaggatatccacggaatgcatgcatagaatcaaaatgcctgccagtactgcagcgttgcagctcggatgtcgattgcccgcactaccctcacaccaagtgcatcggatcgaaatgtgtcaaacttggccaggaatgctcaacctctgctgactgtccataccagcctcacacaatttgccgcaactcacgttgcgataagggagatggcacgggaaccagcgacaggacagtagggaccatccatctacgttcctgcaagagagacgacgactgcgcgtactatcgagatgctgtttgtatgcgtagttattgcatcaatccaggaaaatcgtgcagtaacgatgctggctgtcctcgctatccgcagtcgcagtgcatttacgcaagctgtttggacattgctgcgcataagtgtacgagggacgaggactgtccttattatcccctcacaggatgtgaaaattcacgttgtatgagactggatagctgtcgaacgaatgccgactgctcctcgtaccagagcagagtgtgtgtcagtggacggtgttcgaaacgaagttcttgcagcgtcgactcagattgtcccgccaatagcatatgtgtgaaatctgagtgtgtggatttggaccagtcctgcaatggggactcagactgccctggttacccccgagcccagtgcgtgaactacagatgcaagaaggcgaccacatgtgcgaacgataatgattgcacggaaccgtactcgcgctgcattgacgggatgtgtagaacacttggacaggagtgcgatcgagacagggactgcaagtactacccgcaggtgaaatgcatcaattcacaatgtaccaaggttggacagagttgtgagagagacacagactgtccggattatcccgaaacagtgtgcataaataatagctgcaaaaagatgggtgcctgttctagtgatagcgactgtcccggctatccacaatcggcatgcgtggacaagcgatgtcagaaagttggacaaaattgcgacgaggatgaagactgtccgcaaccgttgtactgtgtcaatcacaagtgttccgcagaaatcgggaagcaatgcacagaagacagcgattgtcccagcttcccacacactcgctgcatcaaatcaaagtgcgcaaaaatgggcttgtcgtgcaactacgacgaggactgtccggatttcccatacacagagtgtaagaactcgaagtgtgcgaaggtggaaccgtcgtgcacaaaagataaggactgcccacaaaatcctgccagagaatgcgtgtcatccctatgcatcaaacgacgcacgtgcacacgtaacgctgactgtcctttccatccggaaaataaatgtctcaacacccattgctgcacaataggaagccgctgcaataacgaccgtcaatgccaagacgaaggatatcgttggtgtgtaaggggtcgttgtataagacttgatctaccatgctatctggatgaggattgtccatatcatccagatacggtgtgtcgtaatgaacagtgtgtaaaacgagagaagacgacgacaactacaactacaaccactactactccatcaactccctcaccctggggacccacgtgccgaaggaagtgctctgctttgacccggggaaaacgtcgtactggacccttgcgtccttcgtgggctcagattggtgtcgatgtggctgtcagtccctatgtggtggatatcatgggaaacgctgagcctcattcaaaccaacacgtgagatcattcacccgtttcaaaggcctaaagaaattgtga

SEQ ID NO: 430 - DNA, 2541 bp, Ancylostoma ceylanicum
atggacaacgattgctccattttccccggaacccaatgcttcgacggtttctgcgtctcaaaaggaaaacaatgcacaacagatgcagattgtcctccttatcctcagtcgcagtgcattcattcgctgtgcctcaagataagggaaagctgtttcgaggatagcgattgtccattccacacaagatgtttgaagtctcagtgcgtgagactgcaaggtcagtgcagcacaaatgtggattgtccgctatcgccgtatactgaatgccacaactctctctgcactcctcgcccgtgcagaagcaactccgactgtctaacttctccaccaatgcagtgtgttcagaattcgtgcagagagctgttcgaatcctgcagagcagatgcggactgtccgccgaagggagacactttctgcataagatcccgctgcgtcgtactcctgcagtcatgtgcccacaataaggagtgtccttactatcctcacactttatgcatggattcgaagtgtatcaaagcagccatttgcagtaacgactacgattgcggccagttcccgggaacattctgcctccaatcacagtgcagagcacctggacactgccgagttgattcggattgtggagctgatcctttcttcaactgcatcaggaacaagtgcatcaaaatcggacagccttgcagaattgatgtagactgcctatacaaccctgaggtgatgtgcttggatagcaaatgcgcgaaagttggtcaagcttgcagttcggactcgatgtgcccaaattatccacttacttattgcatgcactcaaaatgcataaaaatcccaacatgcatcgcagatgaagattgtggaaattttccacagacctcttgtatcaatatgaggtgcgaaaaacttggtcagacatgtcgagtggattctgactgtcctttcagaccatccacagaatgtgtcaacagacagtgtgcgaaacttgggcagagttgtcagcttgacagggattgtccgcttcatcctcacaccatgtgcatcgactccaagtgtgttggggctacatattcttgtagagcagaccgggactgcccactttacccaaaaacggtctgtgtgaacgaccaatgcatgaaacttgggcaacgatgcagagaagattctgagtgcccacaccatcctcaaacttggtgtgtagattctcagtgcaccaagcttggtcagtcatgcggacaagatcaggattgtccttcctatcctcattcagtatgtgttgattcacgttgcatcaaagttggccagaagtgcgcggtcgatactgactgcaaatattatcccaaaataatgtgtttggaatcaaaatgtgtgaaactcagtcaaagctgctcgagggatgaagactgtccgcacaggcctcatacgatttgccttaaatcttggtgtgaaagggttggccaagcctgcagtagagatcgagactgcgcaaactatccagacctacagtgtgtgaacggtggatgccagcgaatttccgggaaatgcagaagggattctgactgtccatatcagccccacacgggctgtgtgaattccgaatgcgtcaaggtaggacaaaactgcagaagtgatgaagactgtccatcttatccatacatggagtgtatgaacaacaagtgcgcagcggtacccggatcttgtcgaaccgacctcgattgttcgcagtatcctcctagagagtgtatacgcaatttgtgtttgaagcgtcggacgtgtagggttaacgatgactgccctttctctcccgagaatcgctgtctgaacacgcactgtaccaagctaggcaaaagttgcagaaaagacagagagtgcaagaatgagggaggccgctcctgtgtcaaccacgtatgcattaggcttgatcttccatgtacctccgatagtgactgtccctattatccaaaaacggtgtgtaaacgcacccgttgtgtcaaagagccgaagacaaccacgacttcccaaacccgttcaactcggcaccctaccacggtacatactgagagaacacgacctcctaccacaacaactaccacaacaactacaacaactacaacggctcgtcgttcacctgaaacataccccgacactactacgcctcggcactgtcctccaaggtatgatgaaacatcaaaggaaccagtaagatcaaaattcctcaacctcattaacaagtgcaggtccgatgtagctctaggtaaagtgaggatgggaaatgggaaaatgactcgggtagctccacgtatgaaacggctgaaatactcctgcaaatcggaagagtccgcacatgcagcagcctctcgctgctctgacacagatagtgacacaccacatgtcctcgaacttcggaaaaaaatccacgactcgaatatcgaccacgtagctgcagcagaacagaattatcaacgaaaaggaggaattgttgtaaaaattccaccgcaacagtcaaatagactgcgagatcggggaactaatgcgtgcactctgctatag

SEQ ID NO: 431 - DNA, 1353 bp, Ancylostoma ceylanicum
atggttcgtcttgcggtggctcttttctgcctggccattgttgcacaggcaacctatctcaacctcccttccatagcgctaaaggtgtctgaacacctattctcgttcgatcatctaccagagccggccgaagtcgccgacgagacatctcaggaaaatgacggggatcttctcaaggagatcgaggaaactcgcaccaagcatgctgaatacaaggcaaagacaagagatgaggacgtttcgtcctactctgaagaggatcaggacagtgacgagagcgatgagaaagtggaagatcggctgaaggacgtcaagcttcccagcatgctcgacgaatcgcgtcagtccaaagatgaagttgtcgtgcgaaatagtgaggaacatgaaggcgtagaggagatcgcttccctgggctctggtaaggaaagggttctcactccagttcgctcaagtctcctcacttcggagaagcaggctgtggaagctgagaagaagagcactgaacacaatggtcgtcaagtacgatacggaggactgaaaaagagtggaaaacactttgagcacaagactaagcctcgagtctgggaaagaagcccatctttcaaagatgaactgcccaaggaatgggactggagaaatgtaaatggtgtaaactactgcagccctacaagaaaccaacacatcccggtgtactgtggctcatgctgggttttcggaacgactggtgcattgaatgaccgtttcaatatcgctcgtaaaaacaagtggcctatgaccatggtatctcctcaggaaatcattgactgcggcggtaagggcaactgccaaggaggcgaagtcggcgatgtgctcgaatatgcgaagacgcacggtctggtcgaggagggatgcaatgtctatcgagcgacgaatggacattgtgacccgttccatcggtgtggtacttgctggccagacaattgtttcgcagtcacgaactacactcgacactatatcactgagtatggaccggtgtctggccgagaaaacatgatggcagaaatcaagaaaggtggaccaatcgcatgttctatcggctgtactccagagttcgattacaactatactggcggtgtatacaagcagaagagtagtcaggggcccaaccacatcgtctcagtgactggttggggtgtggacgagaacgacgtcgagtactggattgtacgaaatagctggggtgaaggatggggtgagaagggctggtatcgtgtggttacatccaagtacatgaacggtactggaaacgagtacaatatgggtatcgagaaggattgttactacgctgatgtcgacgtcagcaacatggagtga

SEQ ID NO: 432 - DNA, 1473 bp, Ancylostoma ceylanicum
atggcgcctctgaagatatttgaccttttgatttccgcgcaatccatcgtattggagtacgcttataatcaattttctttaacaagcgctgatagagagcactatcagtgtttggccgacatggttcgtcttgcggtggctcttttctgcctggccattgttgcacaggcaacctatctcaacctcccttccatagcgctaaaggtgtctgaacacctattctcgttcgatcatctaccagagccggccgaagtcgccgacgagacatctcaggaaaatgacggggatcttctcaaggagatcgaggaaactcgcaccaagcatgctgaatacaaggcaaagacaagagatgaggacgtttcgtcctactctgaagaggatcaggacagtgacgagagcgatgagaaagtggaagatcggctgaaggacgtcaagcttcccagcatgctcgacgaatcgcgtcagtccaaagatgaagttgtcgtgcgaaatagtgaggaacatgaaggcgtagaggagatcgcttccctgggctctggtaaggaaagggttctcactccagttcgctcaagtctcctcacttcggagaagcaggctgtggaagctgagaagaagagcactgaacacaatggtcgtcaagtacgatacggaggactgaaaaagagtggaaaacactttgagcacaagactaagcctcgagtctgggaaagaagcccatctttcaaagatgaactgcccaaggaatgggactggagaaatgtaaatggtgtaaactactgcagccctacaagaaaccaacacatcccggtgtactgtggctcatgctgggttttcggaacgactggtgcattgaatgaccgtttcaatatcgctcgtaaaaacaagtggcctatgaccatggtatctcctcaggaaatcattgactgcggcggtaagggcaactgccaaggaggcgaagtcggcgatgtgctcgaatatgcgaagacgcacggtctggtcgaggagggatgcaatgtctatcgagcgacgaatggacattgtgacccgttccatcggtgtggtacttgctggccagacaattgtttcgcagtcacgaactacactcgacactatatcactgagtatggaccggtgtctggccgagaaaacatgatggcagaaatcaagaaaggtggaccaatcgcatgttctatcggctgtactccagagttcgattacaactatactggcggtgtatacaagcagaagagtagtcaggggcccaaccacatcgtctcagtgactggttggggtgtggacgagaacgacgtcgagtactggattgtacgaaatagctggggtgaaggatggggtgagaagggctggtatcgtgtggttacatccaagtacatgaacggtactggaaacgagtacaatatgggtatcgagaaggattgttactacgctgatgtcgacgtcagcaacatggagtga

SEQ ID NO: 433 - DNA, 279 bp, Ancylostoma ceylanicum
atggattccccagcaaaaacttcgatttcaggaatcaatgcaaatcctctgcaattctaccgccatggaatttcccatccgtggaagattctctgcgagccgttcatgttgaatcacggcgtcctcattgttggatacggcacggagaagaagaaaccgtactggatcattaagaactcgtggggtccgaagtggggcgagagcgggtattacaggctttaccggggtaaaaacgtgtgcggcgtgcaggaaatggccacctcagctgttatttattga

SEQ ID NO: 434 - DNA, 534 bp, Ancylostoma ceylanicum
atgagatccgggatttggtgcgaatccgccgatatcctacacggtttgaacgtgcttttccaatcggatccccatgagttcaaatggacaacaaatgtgtggaacgtgcaagctgtccctcagctctacggtctctccctcagtggcgttagcaatatcattcttacgcaaggcgctcttgatccatggtcaggaggaggctaccagccaggatcgcccagtgcaaaccaggatcaaggcatttacgtaatggagataccaggctcagcacatcacctcgatctgaggacaccgaacacgtgcgatccgaacaccatcaaaaacgcaagataccagatcgttcgaatactggactgctgggtacacggatgcgccacgccgccacggcttggcagtcttccacaaatggttgttcctgtgaacgtaacatgtcaggatgtgaaccaaggttatccttggggtcaaacggactcctgcggacttctattttccttcgcaacgctttgtataatatcacttttgaacatatcatag

SEQ ID NO: 435 - DNA, 543 bp, Ancylostoma ceylanicum
atgagatccgggatttggtgcgaatccgccgatatcctacacggtttgaacgtgcttttccaatcggatccccatgagttcaaatggacaacaaatgtgtggaacgtgcaagctgtccctcagctctacggtctctccctcagtggcgttagcaatatcattcttacgcaaggcgctcttgatccatggtcaggaggaggctaccagccaggatcgcccagtgcaaaccaggatcaaggcatttacgtaatggagataccaggctcagcacatcacctcgatctgaggacaccgaacacgtgcgatccgaacaccatcaaaaacgcaagataccagatcgttcgaatactggactgctgggtacacggatgcgccacgccgccacggcttggcagtcttccacaaatggacttgctcgtgtccgccgctttctgtggcatctctctcacaacgttctgctcattcgtcagtagttccttctcagcacattcttgcttcaaggccttgaagcgccctgtccactgctgtgaaacagtcgggtaa

SEQ ID NO: 436 - DNA, 573 bp, Ancylostoma ceylanicum
atgagatccgggatttggtgcgaatccgccgatatcctacacggtttgaacgtgcttttccaatcggatccccatgagttcaaatggacaacaaatgtgtggaacgtgcaagctgtccctcagctctacggtctctccctcagtggcgttagcaatatcattcttacgcaaggcgctcttgatccatggtcaggaggaggctaccagccaggatcgcccagtgcaaaccaggatcaaggcatttacgtaatggagataccaggctcagcacatcacctcgatctgaggacaccgaacacgtgcgatccgaacaccatcaaaaacgcaagataccagatcgttcgaatactggactgctgggtacacggatgcgccacgccgccacggcttggcagtcttccacaaatggttgttcctgtgaacgtaacatgtcaggatgacttgctcgtgtccgccgctttctgtggcatctctctcacaacgttctgctcattcgtcagtagttccttctcagcacattcttgcttcaaggccttgaagcgccctgtccactgctgtgaaacagtcgggtaa

SEQ ID NO: 437 - DNA, 558 bp, Ancylostoma ceylanicum
atgagatccgggatttggtgcgaatccgccgatatcctacacggtttgaacgtgcttttccaatcggatccccatgagttcaaatggacaacaaatgtgtggaacgtgcaagctgtccctcagctctacggtctctccctcagtggcgttagcaatatcattcttacgcaaggcgctcttgatccatggtcaggaggaggctaccagccaggatcgcccagtgcaaaccaggatcaaggcatttacgtaatggagataccaggctcagcacatcacctcgatctgaggacaccgaacacgtgcgatccgaacaccatcaaaaacgcaagataccagatcgttcgaatactggactgctgggtacacggatgcgccacgccgccacggcttggcagtcttccacaaatggttgttcctgtgaacgacttgctcgtgtccgccgctttctgtggcatctctctcacaacgttctgctcattcgtcagtagttccttctcagcacattcttgcttcaaggccttgaagcgccctgtccactgctgtgaaacagtcgggtaa

SEQ ID NO: 438 - DNA, 1218 bp, Ancylostoma ceylanicum
atgagcagtttagtatttttaatttcaagaagaaaagccgacaaattgttcgaaaatgccgatacaagtggagaacgcaggaaacggcaagccgcaattggaagagatcaatatggaaagtggacagaaggagtgaattacgtcttcagtcctgatgccggtgatggcctgaagagatgttttcgtaaagcagcagaagcttgggagcgggacacgtgcattaatttcaaggaactcaaagagggagctggcgactatctctacgtattcgatgatggtgactactactcgcatgttggaaaatttggaggtcgccaaaatatctccctcgatagcgactgtagattcgtgataggtcgtgctattcacgagattgggcacgcgctagggctctatcacaccgacagtaggtatgaccgcgacagctacgttactgttgcggaggattacctcaagaactatacaaacgagttcagaataattccgaaaaatgaaagtgaaacttatgggacaggatacgattacggaagcatcatgcatcttagctaccccattgtggtccctactgatgagaaatatgccagaacactgggctcttatatgctatcgttcactgacctcttgtcgatcaacaagcactatggatgtctcgataaatgtgacaaaggagagtttgtaaagtgtgaaaatggaggtttcccgcatccacgtaaatgtaacaagaaatgcatttgtccaagtggctacggtggaagcaaatgcaaagcgaggcctggagcaaatgtctgtggagaaatattgatggcgaaagcagaaccgaaacttttggcgcttacaatcaaaaacaacagaacaatttacgattacgccaattgcacctattggattaagtctcccaaggatactgttatcgaaattgaaattgatggtatgccgtttgaattcaaagctccaggctgcgttaaggccggagtagaaatcaaaacaaacgagaatcaaacactgactggataccggttctgcgcaccggaggataaacgaatcaaactaagatcgcattcgaattttgtacctataattgtctacaacaaccggggatacctgtttgcaatggagctaaagtatcgctatggtatattaatgtgtttaattcgcttatttttgtttgaaaaacaaatcaataatcatttcccttcagtgcgaaaaaactcatattga

SEQ ID NO: 439 - DNA, 669 bp, Ancylostoma ceylanicum
atgtttgaatatttcagtggagatggaggacggaaaaaacgtcaaatagtaaaggaaagacaataccataacaaatggtcagaaggagtttattacattttcaatgagaccgctaaaaataagccaaggctaaagggttgtttcctcaaggcagcacgtgcctgggagctgaacacatgtattgattttaaacaaggcagacctgaaaaacctgattatggttatctcgccgtgactgacgaatacgaatacatgtcgcatgtcggtcgacttggagaggagcagcctttgtccattggtgagagctgcgagacagagtttggtcgtgctattcacgaggtcggccacgcactgggactctaccacttccacagtaggtacgaccgcgacagtgaatatattttgaaatttctacagcacaaggaccatgaggtggagtacgcaatggttctacgaaatgaaagtagaaactacgggacttcatacgattacggaagcgtcatgcattatggcgtcaatagcgagaatccagtaatgattcctgcgaacagataccataacagaaccatgggttctgccataatatcgcttgtggactattggttgatcaacaaacattatggatgccttggtatcttgagcaaattttctaatagttccaacctttaa

SEQ ID NO: 440 - DNA, 957 bp, Ancylostoma ceylanicum
atgtttgaatatttcagtggagatggaggacggaaaaaacgtcaaatagtaaaggaaagacaataccataacaaatggtcagaaggagtttattacattttcaatgagaccgctaaaaataagccaaggctaaagggttgtttcctcaaggcagcacgtgcctgggagctgaacacatgtattgattttaaacaaggcagacctgaaaaacctgattatggttatctcgccgtgactgacgaatacgaatacatgtcgcatgtcggtcgacttggagaggagcagcctttgtccattggtgagagctgcgagacagagtttggtcgtgctattcacgaggtcggccacgcactgggactctaccacttccacagtaggtacgaccgcgacagtgaatatattttgaaatttctacagcacaaggaccatgaggtggagtacgcaatggttctacgaaatgaaagtagaaactacgggacttcatacgattacggaagcgtcatgcattatggcgtcaatagcgagaatccagtaatgattcctgcgaacagataccataacagaaccatgggttctgccataatatcgcttgtggactattggttgatcaacaaacattatggatgccttgaaaatatctctctcgcactacttttttctgttctcactgttttaactctgcccacaaaaaatgtgaaatggcgaggctcaccaagtgagacgcgcggtcctcaatgggttaaacttaggcagtcaactatgaacaatccaccggttacgagctctcagaaggagtgtctgcgcaccgggccagagtacttgtactacattttgcagagaattgtgcaccagagaaatctgaaaaatgtgctaacggtggattcgcacatccacgcaactgtgatgtatgtgtttgtcctactggatacggtggaccatactgcaacgagagggtag

SEQ ID NO: 441 - DNA, 963 bp, Ancylostoma ceylanicum
atgtttgaatatttcagtggagatggaggacggaaaaaacgtcaaatagtaaaggaaagacaataccataacaaatggtcagaaggagtttattacattttcaatgagaccgctaaaaataagccaaggctaaagggttgtttcctcaaggcagcacgtgcctgggagctgaacacatgtattgattttaaacaaggcagacctgaaaaacctgattatggttatctcgccgtgactgacgaatacgaatacatgtcgcatgtcggtcgacttggagaggagcagcctttgtccattggtgagagctgcgagacagagtttggtcgtgctattcacgaggtcggccacgcactgggactctaccacttccacagtaggtacgaccgcgacaggtacataactgtaaggccaaacagtatgccgcacaaggaccatgaggtggagtacgcaatggttctacgaaatgaaagtagaaactacgggacttcatacgattacggaagcgtcatgcattatggcgtcaatagcgagaatccagtaatgattcctgcgaacagataccataacagaaccatgggttctgccataatatcgcttgtggactattggttgatcaacaaacattatggatgccttgaaaatatctctctcgcactacttttttctgttctcactgttttaactctgcccacaaaaaatgtgaaatggcgaggctcaccaagtgagacgcgcggtcctcaatgggttaaacttaggcagtcaactatgaacaatccaccggttacgagctctcagaaggagtgtctgcgcaccgggccagagtacttgtactacattttgcagagaattgtgcaccagagaaatctgaaaaatgtgctaacggtggattcgcacatccacgcaactgtgatgtatgtgtttgtcctactggatacggtggaccatactgcaacgagagggtag

SEQ ID NO: 442 - DNA, 399 bp, Ancylostoma ceylanicum
atgttatacggaggtaccgcaagccgagcgagcacaaaaagacgctcaagaggttggcgttatccggacgatcaggctggaaccgcccactgtgctgaaatgtatccagctcgccctcaggacccaccagacctaacaaaaactcgtaaactcatagaagaaaacatcgggaagtggttgaaaagtgggccggtgactaaggaaaccaccaaagcagctactaccactccgactactcccaccactcccggcacttctgccactcgcgccacttccgaaactcctatcgttaccacggaacctaccacggaaacgacaacgacgtcagcgcgaggcattttcactggcttcacattgatcattcaatttttgatggcattagtactggtttcgttgtga

SEQ ID NO: 443 - DNA, 627 bp, Ancylostoma ceylanicum
atgtgtgtgtgtgtgtgtgtgtgtctgtgcatgagaaccaaccactatcgtcaaaaacaaagtgcaccatccgtgagttacgggtgtttcggtccacctttcgtcgctttgaagatcaacaattgtttacaccacaatgaaaatgaacgcgtcttggtgtttattgctctgtgtttatcaggtcatatacaaaataagatgtgggcggatatgttccagagacaatcggaggaaacagaagggcggaaggatgaaagtagcgtcgccatgcgcgctaaaaaatggtactggaaatgttatgataagggaaccgcccactgtgctgaaatgtatccagctcgccctcaggacccaccagacctaacaaaaactcgtaaactcatagaagaaaacatcgggaagtggttgaaaagtgggccggtgactaaggaaaccaccaaagcagctactaccactccgactactcccaccactcccggcacttctgccactcgcgccacttccgaaactcctatcgttaccacggaacctaccacggaaacgacaacgacgtcagcgcgaggcattttcactggcttcacattgatcattcaatttttgatggcattagtactggtttcgttgtga

SEQ ID NO: 444 - DNA, 423 bp, Ancylostoma ceylanicum
atgtgtgtgtgtgtgtgtgtgtgtctgtgcatgagaaccaaccactatcgtcaaaaacaaagtgcaccatccgtgagttacgggtgtttcggtccacctttcgtcgctttgaagatcaacaattgtttacaccacaatgaaaatgaacgcgtcttggtgtttattgctctgtgtttatcaggtcatatacaaaataagatgtgggcggatatgttccagagacaatcggaggaaacagaagggcggaaggatgaaagtagcgtcgccatgcgcgctaaaaaatggtactggaaatgttatgataagggtgcgccggcgtccaaaagtgaagaaacgtctggaatttgttccagcagtgttataagggtgcgccagcgcctaagaatgaggaaacgtctggagtttggtcccacgatgtggtaa

SEQ ID NO: 445 - DNA, 480 bp, Ancylostoma ceylanicum
atgaaaatgatgaaggcggccgtagcagtcctcctttgccttgccgggagcgcaattggagatcgttgctcaaagccgctaatacgtggcccctgtctctcaattagacctcgttacgggtttgatccaaaactaggtaaatgtgtacgattcttctatggtggctgtggaggaaatggtaacaatttcgagacgaaggaggaatgccaggatgtatgtgagagtgatgatccaggactaatgccaccaattgatcctggatttttcaatgaagatacaggaggatcattctctggccccacctctaacgtttgctctcttccagtcgatagaggaaactgtcgtggccgcatgacacgatatgctttcgacgcggaacgtggcagatgtgttccattcatctggggaggatgcggaggaaatgcaaacagatttgagacacagctttcgtgcagagtttcatgtatgcttcatcattag

SEQ ID NO: 446 - DNA, 474 bp, Ancylostoma ceylanicum
atgatgaaggcggccgtagcagtcctcctttgccttgccgggagcgcaattggagatcgttgctcaaagccgctaatacgtggcccctgtctctcaattagacctcgttacgggtttgatccaaaactaggtaaatgtgtacgattcttctatggtggctgtggaggaaatggtaacaatttcgagacgaaggaggaatgccaggatgtatgtgagagtgatgatccaggactaatgccaccaattgatcctggatttttcaatgaagatacaggaggatcattctctggccccacctctaacgtttgctctcttccagtcgatagaggaaactgtcgtggccgcatgacacgatatgctttcgacgcggaacgtggcagatgtgttccattcatctggggaggatgcggaggaaatgcaaacagatttgagacacagctttcgtgcagagtttcatgtatgcttcatcattag

SEQ ID NO: 447 - DNA, 1095 bp, Ancylostoma ceylanicum
atgaaaatgatgaaggcggccgtagcagtcctcctttgccttgccgggagcgcaattggagatcgttgctcaaagccgctaatacgtggcccctgtctctcaattagacctcgttacgggtttgatccaaaactaggtaaatgtgtacgattcttctatggtggctgtggaggaaatggtaacaatttcgagacgaaggaggaatgccaggatgtatgtgagagtgatgatccaggactaatgccaccaattgatcctggatttttcaatgaagatacaggaggatcattctctggccccacctctaacgtttgctctcttccagtcgatagaggaaactgtcgtggccgcatgacacgatatgctttcgacgcggaacgtggcagatgtgttccattcatctggggaggatgcggaggaaatgcaaacagatttgagacacagctttcgtgcagagtttcattttacgctatacccaatccatgcgaactaccgttggcaaaaggaccctgttctgcgtttatcccacgctacggctacgacaaagcgaagggtaaatgcgttcagtttgcgtacggaggatgcaaaggaaacaaaaacaacttcctgtcaatagagaactgccagcaagaatgcatgggcgaaggcattcttgatagagtgtcctccctcagcaagaaatacgtcgagaagaaggagttgacaaaggaagtaaaggcggcattcgacaaagcaaaaaccaaagaggaaaagaagcaacttaaagaggccatccaaaagaacgtagcagaagcaataaagaagaccatcgttgaggagaaaatcaagcgcattgtcaaggatgcagctgtgaagaacaaggtggaaaaggctgtcgagaaactgaaggaattaaaagaaaagaaatctaatccttgcatgatgccgatcgtacaaggaaagtgcagagccttgataaaacgatacgcttttgacgcaaagaaggggaagtgcgtgaagttctcgtacggaggctgtggtggcaacgagaacaacttcgagaccatggctgaatgcaagaagaggtgcaaagctaacaccccgatgcccatctaa

SEQ ID NO: 448 - DNA, 1089 bp, Ancylostoma ceylanicum
atgatgaaggcggccgtagcagtcctcctttgccttgccgggagcgcaattggagatcgttgctcaaagccgctaatacgtggcccctgtctctcaattagacctcgttacgggtttgatccaaaactaggtaaatgtgtacgattcttctatggtggctgtggaggaaatggtaacaatttcgagacgaaggaggaatgccaggatgtatgtgagagtgatgatccaggactaatgccaccaattgatcctggatttttcaatgaagatacaggaggatcattctctggccccacctctaacgtttgctctcttccagtcgatagaggaaactgtcgtggccgcatgacacgatatgctttcgacgcggaacgtggcagatgtgttccattcatctggggaggatgcggaggaaatgcaaacagatttgagacacagctttcgtgcagagtttcattttacgctatacccaatccatgcgaactaccgttggcaaaaggaccctgttctgcgtttatcccacgctacggctacgacaaagcgaagggtaaatgcgttcagtttgcgtacggaggatgcaaaggaaacaaaaacaacttcctgtcaatagagaactgccagcaagaatgcatgggcgaaggcattcttgatagagtgtcctccctcagcaagaaatacgtcgagaagaaggagttgacaaaggaagtaaaggcggcattcgacaaagcaaaaaccaaagaggaaaagaagcaacttaaagaggccatccaaaagaacgtagcagaagcaataaagaagaccatcgttgaggagaaaatcaagcgcattgtcaaggatgcagctgtgaagaacaaggtggaaaaggctgtcgagaaactgaaggaattaaaagaaaagaaatctaatccttgcatgatgccgatcgtacaaggaaagtgcagagccttgataaaacgatacgcttttgacgcaaagaaggggaagtgcgtgaagttctcgtacggaggctgtggtggcaacgagaacaacttcgagaccatggctgaatgcaagaagaggtgcaaagctaacaccccgatgcccatctaa

SEQ ID NO: 449 - DNA, 1140 bp, Ancylostoma ceylanicum
atgaaaatgatgaaggcggccgtagcagtcctcctttgccttgccgggagcgcaattggagatcgttgctcaaagccgctaatacgtggcccctgtctctcaattagacctcgttacgggtttgatccaaaactaggtaaatgtgtacgattcttctatggtggctgtggaggaaatggtaacaatttcgagacgaaggaggaatgccaggatgtatgtgagagtgatgatccaggactaatgccaccaattgatcctggatttttcaatgaagatacaggaggatcattctctggccccacctctaacgtttgctctcttccagtcgatagaggaaactgtcgtggccgcatgacacgatatgctttcgacgcggaacgtggcagatgtgttccattcatctggggaggatgcggaggaaatgcaaacagatttgagacacagctttcgtgcagagtttcattttacgctatacccaatccatgcgaactaccgttggcaaaaggaccctgttctgcgtttatcccacgaactctaaccaaaagtgcacttatgatgaaatggggtttttccagctacggctacgacaaagcgaagggtaaatgcgttcagtttgcgtacggaggatgcaaaggaaacaaaaacaacttcctgtcaatagagaactgccagcaagaatgcatgggcgaaggcattcttgatagagtgtcctccctcagcaagaaatacgtcgagaagaaggagttgacaaaggaagtaaaggcggcattcgacaaagcaaaaaccaaagaggaaaagaagcaacttaaagaggccatccaaaagaacgtagcagaagcaataaagaagaccatcgttgaggagaaaatcaagcgcattgtcaaggatgcagctgtgaagaacaaggtggaaaaggctgtcgagaaactgaaggaattaaaagaaaagaaatctaatccttgcatgatgccgatcgtacaaggaaagtgcagagccttgataaaacgatacgcttttgacgcaaagaaggggaagtgcgtgaagttctcgtacggaggctgtggtggcaacgagaacaacttcgagaccatggctgaatgcaagaagaggtgcaaagctaacaccccgatgcccatctaa

SEQ ID NO: 450 - DNA, 588 bp, Ancylostoma ceylanicum
atgatgaaatggggtttttccagctacggctacgacaaagcgaagggtaaatgcgttcagtttgcgtacggaggatgcaaaggaaacaaaaacaacttcctgtcaatagagaactgccagcaagaatgcatgggcgaaggcattcttgatagagtgtcctccctcagcaagaaatacgtcgagaagaaggagttgacaaaggaagtaaaggcggcattcgacaaagcaaaaaccaaagaggaaaagaagcaacttaaagaggccatccaaaagaacgtagcagaagcaataaagaagaccatcgttgaggagaaaatcaagcgcattgtcaaggatgcagctgtgaagaacaaggtggaaaaggctgtcgagaaactgaaggaattaaaagaaaagaaatctaatccttgcatgatgccgatcgtacaaggaaagtgcagagccttgataaaacgatacgcttttgacgcaaagaaggggaagtgcgtgaagttctcgtacggaggctgtggtggcaacgagaacaacttcgagaccatggctgaatgcaagaagaggtgcaaagctaacaccccgatgcccatctaa

SEQ ID NO: 451 - DNA, 549 bp, Ancylostoma ceylanicum
atgaaacgaaatttactagcactactgttcacaatcacaacctgtcttgcattggcaaagcctcaggcaaagaaatgcacctcaaatttggaatgcgaggaaatctggcccggatcaacatgccagcgatcacgctgtagatgtccagaaaactacgtccgccggagaagtccaagcagagaatgggtgtgtctggcggtgaatgatgcagccactggtcaggttgggcccccgttcacctgtccactaccagacggagccggctaccaagtggtactccggaacgctccacccgatcatctggctcagagcgtaccagtgctttgctcatcaaagacaaacgactgcgaaactggttacgagtgcattcaaggattgtcagcgattgatggactcgacggtgtgtgctgcccggatcagagtaagtttttccacgttttccttggattttgtcattattttcgaactaagtccggggaatttttaagccaacaattcaatctgctctcttccagtaacaacctgcgcccacccgatattcgaccatga

SEQ ID NO: 452 - DNA, 1482 bp, Ancylostoma ceylanicum
atgtcaattcgaagaagttttctgtacataactattcttggaatttcaatagtgaatgcgaacagtgaatcagcacccctagagagtttgaaaagaaaactaaaggaactggatggatccaacaatgagcaaggagtccgaagattcgtgactctgggcgatatcctcttgacaagggatgaggcccgtgagcttattgaagatgaggaggaagaactaagtcgacacaaacgccaagcgcagcgaaggaatgcgtcgaacgagaatctgtgggtggatggagtgaaatatgtattcgaccccaacgctagtcaaaaactgaaggacggtttcaccctcgcagtcaatgcttggcagaaagacacgtgcatcaactttactttagtacaaacaagagaagaggttaaaggagaggattacctttatgtgacaaccgacgagacagacccgaaaggatgcttatcacacgtcggtaaacttggaggatatcagccaatatttcttggtgatggatgtgaatccttcccccacgctgctcatgaagtcgggcacgcattaggaatgtatcatacccagactaggcatgatcgcgacaagtatatacacttgaaagacgataatatagaggaggaatataaagaacagtacctaaagttgacagaagaaaagaatgagaactatggattcccttatgactacggaagtattatgcactacggctcttccgtcgagaacccttggatggttccattcgatgccaattacaagacaactatggggtcacctttcatatcgtttattgacctatttatgatgaacacgcattacaattgtacagaaggtgcagttcgacatcgggaaaccggtgtggatgtattttgttgcggaataagttcgtgcggttttttcaattcaatttttcacggtgatttagactttgatagtttccaagatatatgtgatccaaaaacatcagctcagtgtgaaaacggtggatttcctcatccgcgaaaatgtgatgaatgtatatgtcctggcggctacggtggtgcgctttgtaaccaacggccccaagactgtgccgatggtaaaacattagaagcgtccgacggatggaagtctttggaagctaatattcataaaacgaaagatgacggaacctacgctacgtgtacctactggataacggctcctgatgacaaaaaaatcgagattgaaattgaaagcataaataccaaagagcctaccatcggatgtgcaaaaggaggtgtagagatcaaggcgaacgaaaaccacactttaaccggctacaggtactgtgttgacccggcggaaagcttcaagatcaaatctcattcgaaccgagttcccgtcatcttatacacgggagtaccactattctggactactgttgaactgagatatcatgcggtaatcgacctcgtccatttcctctttatacagtcttccttatgcagctaa

SEQ ID NO: 453 - DNA, 741 bp, Ancylostoma ceylanicum
atggcgagatataacatccagggttttcttggcgatcacgagaatatgaacgttctcacttggatcgccatcgcttctttacataagatcaatcagcaggaaaatgaaaatctcaaagccagctgcggtgcaatacaccttaaggtgccagaaccagaacttccccacttcatgtcaactggaaaccctgtgccgccaaacaaatatccattcatcgcaggattcgatactctcgcgaattatcgatctaaaaaaagatgcacgggtgtacttatttcgaagcgccacgtcctgacggcggctcattgcgtctacgacaattcacaggtgatactaccgggaccttattgcaatccgcacggcaaattattaccaacactcgatatgacgatttacctcggtaccaaatgccccaaacccggtgactgccccaatggagaagagcgaacaccttacaaacctcgctatataattcctcatccaaagtatgaaccctgtcgtggccatataaacgatatagcactgattgagctcgacatagaagcgaagccagaagaggcttcacctatctgtatgccggaagaagacgattcaatgttataccaaactgttactgctattgggtacgggaccgataattttgtctccattcttggaagtggcttcccgaaaaccaagagggaagacgcaagtgatgcgccgcagacatcgtcgtcgaattcatcctttaattcttcttaa

SEQ ID NO: 454 - DNA, 1026 bp, Ancylostoma ceylanicum
atgagtagtttgcttccaagggacaaacctcaccgtatggcgcagcagcgacattccgaaccagaaagtgcactggcaccagaagattcaatcgattacaccgaacgtttcacggaattcatgaaaaaattcgagaaagaatatgacgagaataaggaattgctgaaacgattcaagacctacgagaagcacatgagggagatagccgagctgaacagaaagaacgctcacggcgcctcctatggagagaacgagctaagcgactggactgatgaggagtttcaaaagtcgcttctcccactctcattctacaaaacactccgcgaaaaagccacatttatccgacgagatcctcccaagcccgagcgatccatgccaccagcggattttttcgactggagaaccaagaacgtaatatcgccggttaaggcgcaagggaaatgtggctcgtgctgggcatttgccgccacggctactgtggaggccgcatgggcgatcgctcataaagagatgcgaaatctttctgagcagacgcttctcgactgtgatctcgaggacaacgcctgtgacggcggcgacgaggacaaggccttccgcttcattcaccgacacggcctcgcctacgcagccgacctgccatacgtcgcacatcgacagaacacctgcagtatcactggaaatgtcaccaagatagatgtcgcatatttcctgcatcctgacgaacaatcgatgatcgattggttggttggatttggaccggtgaacatcggtattgccgtaacacaggatatgcgagcgtacaaagggggagtattcactccaagcgcagaggactgcaaaaataaggtaattggacttcattcgctcttgattaccggttacggcacaagcgattccggagagaaatactggattgtgaagaacagttggggaaatacttggggtgtcgagcatggctatatttatttcgccagaggtattaacgcctgtggtatcgaagccgagcccattggtatacttgcatag

SEQ ID NO: 455 - DNA, 1173 bp, Ancylostoma ceylanicum
atgacaggcatcaaattcaatgaaggtaaagagactcaagcgcctttatggattgagggaggtcccgctgaccctatcgcagctggtcgtagaatgaaccgaactcttttccagttcgccgttgccattttcttcatactttctactattggatatgtaatcttcgtggacaaacctcaccgtatggcgcagcagcgacattccgaaccagaaagtgcactggcaccagaagattcaatcgattacaccgaacgtttcacggaattcatgaaaaaattcgagaaagaatatgacgagaataaggaattgctgaaacgattcaagacctacgagaagcacatgagggagatagccgagctgaacagaaagaacgctcacggcgcctcctatggagagaacgagctaagcgactggactgatgaggagtttcaaaagtcgcttctcccactctcattctacaaaacactccgcgaaaaagccacatttatccgacgagatcctcccaagcccgagcgatccatgccaccagcggattttttcgactggagaaccaagaacgtaatatcgccggttaaggcgcaagggaaatgtggctcgtgctgggcatttgccgccacggctactgtggaggccgcatgggcgatcgctcataaagagatgcgaaatctttctgagcagacgcttctcgactgtgatctcgaggacaacgcctgtgacggcggcgacgaggacaaggccttccgcttcattcaccgacacggcctcgcctacgcagccgacctgccatacgtcgcacatcgacagaacacctgcagtatcactggaaatgtcaccaagatagatgtcgcatatttcctgcatcctgacgaacaatcgatgatcgattggttggttggatttggaccggtgaacatcggtattgccgtaacacaggatatgcgagcgtacaaagggggagtattcactccaagcgcagaggactgcaaaaataaggtaattggacttcattcgctcttgattaccggttacggcacaagcgattccggagagaaatactggattgtgaagaacagttggggaaatacttggggtgtcgagcatggctatatttatttcgccagaggtattaacgcctgtggtatcgaagccgagcccattggtatacttgcatag

SEQ ID NO: 456 - DNA, 1083 bp, Ancylostoma ceylanicum
atggtgagttcttgttttcttcataatcttgaatatttgagccagaggtgttttaagagattagccatcttcctggtgtgcatctcgccatcgtgggcgtttgccatcctcggaaacaatggactaggaaaaccatctccaatggaagcaaatgcactgactggcaaagctctggcagactacctcaatcaaaatcaacagctctttaaggcagaggcgaacggtgatgaagagatctacaagctcaaattaatggatttaaagttcgtcggaagaggccctctaacggaggaagattacttctttgatgactccaacgacactgacattccagagagctttgatgctcgtgttgaatggcccgattgtccgtcattgaaatctatccgcgaccaagccaactgtggctcttgttgggcagtctcgtccgctgaagcgatgtctgaccgagtttgcattgcaagtaaaggggtgaagaagatgcttctctcagcagacgacatcctttcctgctgcacaaagtgtggattcggatgtaacggcggatggcctatcatggcatggcaatacttcgtccagaaaggcatatgcactggaggagcgtacggtgaaaagggtgtgtgcaagccgtatgagatctcaccgtgtggacaccacaaaaacgagacctactatggcgaatgcaacgacctcgccgaaacaccgaaatgcttgcgaaaatgtcaagatggatatccaaaaagttacaaggacgataagatatttggaaagactgcatatgcagttcccggatctgtaagcgccattcagcgagacataatgaaaaacgggccagtcgttgctgcgttcaccgtctattccgacttcatgcaatacaaaagtggaatttataagcatactgttggaggtgaagaaggaggacatgcagtgaaaatcataggatggggatctgagaacggagttccttactggatcatagctaactcgtggaattctgactggggagaggatggattcttccgtatgatccgtggagagaacgattgcggaattgaagaaaatattgttgccggactcgtctaa

SEQ ID NO: 457 - DNA, 642 bp, Ancylostoma ceylanicum
atgacagtgactttgttcttcttttttacacttttgaacgaaattttcaggttctcatctcagcagatgatcttctttcctgctgtgcgggatgtggtgatggatgtgagggcggatggccactttcagcatggcgctattttgctcgaaaaggcctatgtaccggaggaccttatggtgacaagaccgtacgagatcccaccttgcggtcatcacaaaaacgaaacgtactatcacgaatgtaaggacatggccgataccccacaatgcgagcataaatgtcaggatggatatccaaaaagttacaaggacgacaagatattcggaaagaaagcatatgctcttcccaattccgtgagcgcaatccaacgagacattctgaaaaacgggccagttgtcgctgcgttcacagtttatgaagactttatgcattacaagggcggaatttataaacacacggcaggcgatgaacaaggaggacatgcagtgaagatcattggttggggatctgagaacggcgttccttattggataatcgccaactcgtggaattctgattggggagagaatggattcttccgcatgatccgtggagaggatgattgtggaatcgaggaagacgttgttgctggacacgtctaa

SEQ ID NO: 458 - DNA, 774 bp, Ancylostoma ceylanicum
atgactgaagcggttaacactgaagctaaacgagtcggttttgttgtactgtttagtgataacgatgccatctattacagacttatatggatcaccgagctacctaaggttcgtgctgggcggtttcctcggctgaagcaatgtctgatcgagtttgtatcgcaaccaatggaaaggaaaaggttctcatctcagcagatgatcttctttcctgctgtgcgggatgtggtgatggatgtgagggcggatggccactttcagcatggcgctattttgctcgaaaaggcctatgtaccggaggaccttatggtgacaagaccgtacgagatcccaccttgcggtcatcacaaaaacgaaacgtactatcacgaatgtaaggacatggccgataccccacaatgcgagcataaatgtcaggatggatatccaaaaagttacaaggacgacaagatattcggaaagaaagcatatgctcttcccaattccgtgagcgcaatccaacgagacattctgaaaaacgggccagttgtcgctgcgttcacagtttatgaagactttatgcattacaagggcggaatttataaacacacggcaggcgatgaacaaggaggacatgcagtgaagatcattggttggggatctgagaacggcgttccttattggataatcgccaactcgtggaattctgattggggagagaatggattcttccgcatgatccgtggagaggatgattgtggaatcgaggaagacgttgttgctggacacgtctaa

SEQ ID NO: 459 - DNA, 648 bp, Ancylostoma ceylanicum
atgaaagaccttgaaacggttgaaaacatcctaaccgaacgcctaagaatgtcaatggtcacgccacgatgggtcccgaaaaccccctcggcgtttggaaactgccaaggtggatggccaattatagcatggcgctatttcgtcgaacacggtatatgcagtggaggggcttacggagataagaatacgtgcaaaccatatgaattcgccccatgtgggcaccacaaaaaccaaacctactatcatgaatgtaaaggtcgtacagaaccgccgaaatgtcagcgcaaatgtcaggatggatatccagtaagctatgaagatgacaaaacatacggatggaccgcgtacttccttcgaagcgtgagtgcaattcaacgcgacataatgaagaacggaccagttgttgcagcattcatggcatacgaagacttcttgcagtataagagcgggatttataagcacactgctggtgccgaagtcggaggacatgttgtgaagatcattggatggggaacagagaatgatgtcccttattggatcatggccaactcgtggaacactgattggggagaggatggattcttccgcatgatccgcggagtcgatgagtgcctgattgaggactacgttgtggccggtcttgtttga

SEQ ID NO: 460 - DNA, 675 bp, Ancylostoma ceylanicum
atggccaagaaatgcgcttcaagcagagggcagttgtcgaattcttgtttcatgacggaatttcagcaaatgaaattcacagctgtctgcagaatgtttataaggcagaagccctctcttatagccagctgccaaggtggatggccaattatagcatggcgctatttcgtcgaacacggtatatgcagtggaggggcttacggagataagaatacgtgcaaaccatatgaattcgccccatgtgggcaccacaaaaaccaaacctactatcatgaatgtaaaggtcgtacagaaccgccgaaatgtcagcgcaaatgtcaggatggatatccagtaagctatgaagatgacaaaacatacggatggaccgcgtacttccttcgaagcgtgagtgcaattcaacgcgacataatgaagaacggaccagttgttgcagcattcatggcatacgaagacttcttgcagtataagagcgggatttataagcacactgctggtgccgaagtcggaggacatgttgtgaagatcattggatggggaacagagaatgatgtcccttattggatcatggccaactcgtggaacactgattggggagaggatggattcttccgcatgatccgcggagtcgatgagtgcctgattgaggactacgttgtggccggtcttgtttga

SEQ ID NO: 461 - DNA, 1050 bp, Ancylostoma ceylanicum
atgacagaatgctctcagaggcccttggcatctgtggtgtgcattttggtgtcgtgcctttctgccactctacaggaagatgaggctgcacgcactcctcacatcgagtccaacagcctcatgggtaaagctttggtagactatgtcaacgcgaatcaacagctgttcaaggcagaagcaaatggtaatgaggaaatatacaaacacaaattaatggatgtgaagtttgccaagaggggccctacattagaagaagaatatttccttgaagactcgaacgacaccgacattcccgaaagctttgatgctcgcgtgcagtggcctgattgcccatcactaacagccattcaggaccaggccaattgtgggtcgtgctgggcagtagcatcggctgaaaccatgtctgatcgagtttgcattgcaagcaatggaaggaagaaggtgaccctttctgcagaagatctgctctcctgctgttgggaatgcactttctttcatgcctttgcatgcgtcggaggttggacaatgagtgcttggcgccattttgtccggaaaggtgtatgcactggaggagcgtacggtgagcagaaagcctgcatgccgtatgagttcccaccatgtggacatcatacgaaccagacttactacggggaatgcaatggtttcaaagtaccgcagaaatgcatgtacaaatgtcaggatggatatcctgtgaactacaacgacgacaaaacttatgggaagaaagcttacgcgattcctcagtcagtaagcgcaattcaacgagatatcataaagaatggtccagtcgttgctggatttagggtttttgaggatcttgtttattataaaactggaatttacaagcatactgctggtaaagcacaaggaggtcatgcggtgaaaatcattggatggggagtggagaacgacgtgccttactggatcatagccaactcgtggaataccgactggggagaggatggtgggtttcatcatgctattctagcccaactcttgttttacttgtacttcttttctggaagttaa

SEQ ID NO: 462 - DNA, 408 bp, Ancylostoma ceylanicum
atggttggggacgaacgtgataagcagggcgcatatcccgttacggtgctgatttttttaattagtcgaagtttcgacgcgcgcacgtactggccagaatgcaaatcgattcgcatgattcgtgaccagtcagaatgtggttcatgttgggcagtatcgtcagcgtcggctatgtcagatgaattatgtgtgcagtcgaacggtacgataaagctgactctttccgacacggatctacttgcatgctgtgatgactgtggagggtgctttggtggttggccgagcaaggcatacaagtgggcggagagggcaggggttgtcactggtggaaaatacagacaaaaggtgatgttccgtattaccgcggccacactgagtaggctcaactactccgatgacttgaaatga

SEQ ID NO: 463 - DNA, 708 bp, Ancylostoma ceylanicum
atgattcgtgaccagtcagaatgtggttcatgttgggcagtatcgtcagcgtcggctatgtcagatgaattatgtgtgcagtcgaacggtacgataaagctgactctttccgacacggatctacttgcatgctgtgatgactgtggagggtgctttggtggttggccgagcaaggcatacaagtgggcggagagggcaggggttgtcactggtggaaaatacagacaaaagaatgtgtgcaagccatacgttttctatccatgtggagagcacgagcatgaaccctactacggaccgtgccctgagatatggtggcccaggccaaaatgtcgacggacgtgtcactataaatacaataagggataccaagaagacaagcactttgtgaagcgtagctactatctcccgacgaatgaaacaagcatcaggcaagagatattcgtaaacggccccgtagtcgccattttccatgtctacgacgacttccttgagtacaaaaagggaatttatgtgcacaagtggggttccgatagaggtgcacatgctgtcaaaatcattggctggggagaagaagataacttgaagtactggctgatttcaaactccttaaacactgactggggagaggatggctttttccgtatgcttcgcggatttgaccactgcaacattgaaaatctagtgtacggaggaatcatgaagatatga

SEQ ID NO: 464 - DNA, 822 bp, Ancylostoma ceylanicum
atggttggggacgaacgtgataagcagggcgcatatcccgttacggtgctgatttttttaattagtcgaagtttcgacgcgcgcacgtactggccagaatgcaaatcgattcgcatgattcgtgaccagtcagaatgtggttcatgttgggcagtatcgtcagcgtcggctatgtcagatgaattatgtgtgcagtcgaacggtacgataaagctgactctttccgacacggatctacttgcatgctgtgatgactgtggagggtgctttggtggttggccgagcaaggcatacaagtgggcggagagggcaggggttgtcactggtggaaaatacagacaaaagaatgtgtgcaagccatacgttttctatccatgtggagagcacgagcatgaaccctactacggaccgtgccctgagatatggtggcccaggccaaaatgtcgacggacgtgtcactataaatacaataagggataccaagaagacaagcactttgtgaagcgtagctactatctcccgacgaatgaaacaagcatcaggcaagagatattcgtaaacggccccgtagtcgccattttccatgtctacgacgacttccttgagtacaaaaagggaatttatgtgcacaagtggggttccgatagaggtgcacatgctgtcaaaatcattggctggggagaagaagataacttgaagtactggctgatttcaaactccttaaacactgactggggagaggatggctttttccgtatgcttcgcggatttgaccactgcaacattgaaaatctagtgtacggaggaatcatgaagatatga

SEQ ID NO: 465 - DNA, 456 bp, Ancylostoma ceylanicum
atgaaccctactacggaccgtgccctgagatatggtggcccaggccaaaatgtcgacggacgtgtcactataaatacaataagggataccaagaagacaagcactttgcttatctcttcgtcatcgaatttagtgaagcgtagctactatctcccgacgaatgaaacaagcatcaggcaagagatattcgtaaacggccccgtagtcgccattttccatgtctacgacgacttccttgagtacaaaaagggaatttatgtgcacaagtggggttccgatagaggtgcacatgctgtcaaaatcattggctggggagaagaagataacttgaagtactggctgatttcaaactccttaaacactgactggggagaggatggctttttccgtatgcttcgcggatttgaccactgcaacattgaaaatctagtgtacggaggaatcatgaagatatga

SEQ ID NO: 466 - DNA, 1032 bp, Ancylostoma ceylanicum
atgtggatcctcgcagcgttattggcaacggcttttgccgcaaaaccgactacagttgaggagttcctcgctcaacccgtagagaaagatgttgaaaagctaactggacaagcctttgttgactacatcaacgaacatcaatcgttctacaaggcagaatactctccagatgcagaagcgttcgtgaaagctcggataatggactcgaagtttttagtgacacctaagaaagaagaagtgttgatggacgtatatggtgatgaccctcctgagagctttgatgcgcgcacgcaatggccagaatgcagagcaattggcaccattcgtgaccaatcttcctgcggttcgtgttgggcagtggcgtcagcgtcggctatgtcagatgaaatgtgtgtgcagtcaaacagttcgataaagttgatgatttccgacacggatatactgtcgtgctgtggactcgaatgcggatatggatgccagggtggctggccaatcgaagcataccgttggatggagcgcgacggcgttgttactggtggaaaatacaggcagaaggatgtgtgcaagccatacaccttctatccttgtggaaatcataaggatgatccctactatggaccgtgtcctggttacctgtggcccactccaaaatgtcgaaagtcatgccagcgtaaatacaaaaagacttaccaagaggacaagcactttgcaacaaggtcttacttcctcccgaataatgagagaagcatcaggcaagagatctacaagaacggacctgtagtagccgctttcaaggtctacgaggacttcagtttctacaaaggaggaatctacgtgcacaagtggggtattcaaaccggagcacatgcggtcaaagtcattggttggggcagagaaaatggaacagactactggctgattgcaaactcctggaacaccgactggggagaggatggttatttccgcattgttcgtggaactgacaactgcgaaattgaaagacagatggttggtggaatcatgagagtgtga

SEQ ID NO: 467 - DNA, 1200 bp, Ancylostoma ceylanicum
atgtggatcctcgcagcgttattggcaacggcttttgccgcaaaaccgactacagttgaggagttcctcgctcaacccgtagagaaagatgttgaaaagctaactggacaagcctttgttgactacatcaacgaacatcaatcgttctacaaggcagaatactctccagatgcagaagcgttcgtgaaagctcggataatggactcgaagtttttagtgacacctaagaaagaagaagtgttgatggacgtatatggtgatgaccctcctgagagctttgatgcgcgcacgcaatggccagaatgcagagcaattggcaccattcgtgaccaatcttcctgcggttcgtgttgggcagtggcgtcagcgtcggctatgtcagatgaaatgtgtgtgcagtcaaacagttcgataaagttgatgatttccgacacggatatactgtcgtgctgtggactcgaatgcggatatggatgccagggtggctggccaatcgaagcataccgttggatggagcgcgacggcgttgttactggtggaaaatacaggcagaaggatgtgtgcaagccatacaccttctatccttgtggaaatcataaggatgatccctactatggaccgtgtcctggttacctgtggcccactccaaaatgtcgaaagtcatgccagcgtaaatacaaaaagacttaccaagaggacaagcactttgatcacagagaaagtcaaatgagaggcgagtctggaaaaaggcagacggcaagcaccactgcagcttttgcgttagcttcctcaattcacgacaagcaactatccgtaaaaatacacccttggatcaatactcgattttgttggcttattgcacagttatcgaattcagcaacaaggtcttacttcctcccgaataatgagagaagcatcaggcaagagatctacaagaacggacctgtagtagccgctttcaaggtctacgaggacttcagtttctacaaaggaggaatctacgtgcacaagtggggtattcaaaccggagcacatgcggtcaaagtcattggttggggcagagaaaatggaacagactactggctgattgcaaactcctggaacaccgactggggagaggatggttatttccgcattgttcgtggaactgacaactgcgaaattgaaagacagatggttggtggaatcatgagagtgtga

SEQ ID NO: 468 - DNA, 612 bp, Ancylostoma ceylanicum
atgatttttctgggattcagatgccagggtggttggccgattgaggcatatcgctggatgcagcgcgatggcgttgtcacaggtggaaaatacagacagagggatgtgtgcaagccatactccttctatccgtgtggacaacataaggatgatccctactatggaccatgtcctcaagatctgtggcccactccaaaatgtcgaaagagttgccagcgtaaatataagaagtcctaccaagaagacaagtactttgcaaccaggtcttatttcctcccgaataatgaaaggagcatcaggcaagagatctacaagaacggaccggtagtcgccgctttcaaagtctaccaggacttcagtttctacagaggaggcatctatgtggtgtgttcctatgtttctacgaaaaacaattccacctcacattattccactcactactgtacaaataccaaagcattgtcaccattccagcacaagtggggtatgcaaacaggagcacatgcggtcaaagtcgttggctggggcagagaaaatggaacagattactggctgattgcaaactcctggaataccgactggggagaggatggtatgtattttgtgaagtaa

SEQ ID NO: 469 - DNA, 645 bp, Ancylostoma ceylanicum
atgatttccgacacggatatcctctcgtgctgtggactcgattgcggatatggatgccagggtggttggccgattgaggcatatcgctggatgcagcgcgatggcgttgtcacaggtggaaaatacagacagagggatgtgtgcaagccatactccttctatccgtgtggacaacataaggatgatccctactatggaccatgtcctcaagatctgtggcccactccaaaatgtcgaaagagttgccagcgtaaatataagaagtcctaccaagaagacaagtactttgcaaccaggtcttatttcctcccgaataatgaaaggagcatcaggcaagagatctacaagaacggaccggtagtcgccgctttcaaagtctaccaggacttcagtttctacagaggaggcatctatgtggtgtgttcctatgtttctacgaaaaacaattccacctcacattattccactcactactgtacaaataccaaagcattgtcaccattccagcacaagtggggtatgcaaacaggagcacatgcggtcaaagtcgttggctggggcagagaaaatggaacagattactggctgattgcaaactcctggaataccgactggggagaggatggtatgtattttgtgaagtaa

SEQ ID NO: 470 - DNA, 984 bp, Ancylostoma ceylanicum
atgtggattctggcggtgttagtagtaacggcacttgccgcgaaaccgacgactgttgaggagtttctcgctcaacccgtcgataagcacgttgaacagctatctggacaagctttcgttgactacatcaacgagcaccagtcgttctacaaggcagagtattcacctgaagcagaagcgttcgtgaaagctcggataatggactcgaagttcttagtgccacctaagaaagaggaagtgttgaccgatgtgtatggtgacgatcctccagcgaggtacgcatctattaagaatcctgcgtatgggttgaatcagcccattcaaacctcttttaaggtgatgatttccgacacggatatactctcgtgctgtggactcgactgcggatatggatgccagggtgggtggccaatcgaagcataccgttggatgcagcgcgacggtgttgtcactggtggaaaatacagacaaaaggagaactgcaaaccatacgccttctatccgtgtggacatcataaggatgatccctactatggaccgtgtcctggttacctttggcccactccaaagtgtcgaaaaacgtgccagcgtaaatacaaaaagacttaccaacaggacaagcactttgcaacgaggtcttacttcctcccgaataatgaaaggagcatcaggcaagagatctacaagaacggacccgtggtcgctgctttcaaagtctaccaggacttcagctactacaaaggaggcatctatgtgtgtacaaataccaaagcattgtcaccattccagcacaagtggggtatgcaaacaggagcacatgcggtcaaagtcgttggttggggcagagaaaatggaacagattattggctgattgcaaactcctggaataccgactggggagaggatggttatttccgcattgttcgtggaactgacaactgcgagattgagagacaaatggtcagtggcatcatgagagtgtga

SEQ ID NO: 471 - DNA, 1065 bp, Ancylostoma ceylanicum
atgtggattctggcggtgttagtagtaacggcacttgccgcgaaaccgacgactgttgaggagtttctcgctcaacccgtcgataagcacgttgaacagctatctggacaagctttcgttgactacatcaacgagcaccagtcgttctacaaggcagagtattcacctgaagcagaagcgttcgtgaaagctcggataatggactcgaagttcttagtgccacctaagaaagaggaagtgttgaccgatgtgtatggtgacgatcctccagcgagctttgacgctcgcacgcactggcccgaatgcagatcgattggcaccatacgtgaccaatcttcttgcggttcgtgttgggcagtggcgtcagcggaagccatgtcagatgaagtgtgtgtgcaatcaaacagttcgataaaggtgatgatttccgacacggatatactctcgtgctgtggactcgactgcggatatggatgccagggtgggtggccaatcgaagcataccgttggatgcagcgcgacggtgttgtcactggtggaaaatacagacaaaaggagaactgcaaaccatacgccttctatccgtgtggacatcataaggatgatccctactatggaccgtgtcctggttacctttggcccactccaaagtgtcgaaaaacgtgccagcgtaaatacaaaaagacttaccaacaggacaagcactttgcaacgaggtcttacttcctcccgaataatgaaaggagcatcaggcaagagatctacaagaacggacccgtggtcgctgctttcaaagtctaccaggacttcagctactacaaaggaggcatctatgtgtgtacaaataccaaagcattgtcaccattccagcacaagtggggtatgcaaacaggagcacatgcggtcaaagtcgttggttggggcagagaaaatggaacagattattggctgattgcaaactcctggaataccgactggggagaggatggttatttccgcattgttcgtggaactgacaactgcgagattgagagacaaatggtcagtggcatcatgagagtgtga

SEQ ID NO: 472 - DNA, 861 bp, Ancylostoma ceylanicum
atgccgccatatcagaacagacagcggaactcatgcctcttcggattcaaccgaataggatcttctgaagatcaggaaagtatacgacaaaacacagcggcgaaatgtcttatatctggtcttgcaaaagtgagccaatcttgtatgatgctggtatcatgggctatgcgagatgaaataataataaaaacactcagatgcagaggtggttggatgaagagagcatacgattggatggagagcaccggtgttgtcacgggcggacatttcagacagaggggtgtgtgcagaccatatgcattctatccatgtggacatcacgaggatcagaaatactatggaccatgtccgcaggggtcatggccgactccgagatgtcgaaagacgtgtcagcgcggatataataaatcctacgcagatgacaagtacttcgcaacgaaatcctattatctcccgaaggatgaaaagaagatcaggcaagagatctacaaaaatgggcctgttgtagctggatttgatgtctacacggacttcttgcactacaagaaagggatttacgtgcacacatcaggttacaaatcaggagcacatgcggtaaaagttattggctggggtcgtgaaaatggaacagattactggctgattgcaaactcatggaattccgactggggagacaatggtatgtacttttcaatatcatcactctatagcaatttcaaaccacctagagtcatagcgttcaggctacttccgcatacttcgtggaaagaaccactgtggtatcgaagaatcgatggttggaggactcatgaaagtataaagtgctcgataacaacgtatttcatccgagcgcgaaaatga

SEQ ID NO: 473 - DNA, 570 bp, Ancylostoma ceylanicum
atgtggattctcttcgtattggtggttacggcatttgccgcgaagccgactacgattgaggagttcctcgccagacccaaaacagagcctgctcagccccttactggacaagctctcgtagactacgtcaatgaacaacaatcattcttccaggctgaatataatcagcaagcagaagaactcgcgaaattccggttaatggagccggagttcctcgtgaaaccaaagaaagaagaagtgttgtcagatgtatatggtgacgagccacctgagagtttacagttgttaaaaaaaatacttgcctccggcatccacgcccgtctgctaagacacgccgcgcctcctgcattatcatacgtgctgcgacatggctcagtcgacgcgcaggcttcgacgcccgcgaccattggaaagattgcaaatcgatcggcactattcgtgaccagtcagcttgcggtatgtcaaacgaagtcaacttcttcttcaaagttcatgttgggcagtttcgtcagcggaagctatgtcggatcaactgtgtgtgcagtcgaacggcaggataaaggttcatag

SEQ ID NO: 474 - DNA, 579 bp, Ancylostoma ceylanicum
atgtggattctcttcgtattggtggttacggcatttgccgcgaagccgactacgattgaggagttcctcgccagacccaaaacagagcctgctcagccccttactggacaagctctcgtagactacgtcaatgaacaacaatcattcttccaggctgaatataatcagcaagcagaagaactcgcgaaattccggttaatggagccggagttcctcgtgaaaccaaagaaagaagaagtgttgtcagatgtatatggtgacgagccacctgagagtttacagttgttaaaaaaaatacttgcctccggcatccacgcccgtctgctaagacacgccgcgcctcctgcattatcatacgtgctgcgacatggctcagtcgacgcgcagggtagcgggaggcaatttagcttcgacgcccgcgaccattggaaagattgcaaatcgatcggcactattcgtgaccagtcagcttgcggtatgtcaaacgaagtcaacttcttcttcaaagttcatgttgggcagtttcgtcagcggaagctatgtcggatcaactgtgtgtgcagtcgaacggcaggataa

SEQ ID NO: 475 - DNA, 603 bp, Ancylostoma ceylanicum
atgtggattctcttcgtattggtggttacggcatttgccgcgaagccgactacgattgaggagttcctcgccagacccaaaacagagcctgctcagccccttactggacaagctctcgtagactacgtcaatgaacaacaatcattcttccaggctgaatataatcagcaagcagaagaactcgcgaaattccggttaatggagccggagttcctcgtgaaaccaaagaaagaagaagtgttgtcagatgtatatggtgacgagccacctgagagtttacagttgttaaaaaaaatacttgcctccggcatccacgcccgtctgctaagacacgccgcgcctcctgcattatcatacgtgctgcgacatggctcagtcgacgcgcagggtagcgggaggcaagtattttttggaaaggctatatatagtctcttcgacgcccgcgaccattggaaagattgcaaatcgatcggcactattcgtgaccagtcagcttgcggtatgtcaaacgaagtcaacttcttcttcaaagttcatgttgggcagtttcgtcagcggaagctatgtcggatcaactgtgtgtgcagtcgaacggcaggataa

SEQ ID NO: 476 - DNA, 993 bp, Ancylostoma ceylanicum
atgccgccatatcagaacagacagcggaactcatgcctcttcggattcaaccgaataggatcttctgaagatcaggaaagtatacgacaaaacacagcggcgaaatgtcttatatctggtcttgcaaaagtgagccaatcttgtatgatgctggtatcatgggctatgcgagatgaaataataataaaaacactcaggggaatccttttgttcgagcaagaaaaaattccaaaattcattttttgtggtgatcactgtcgggagtactgcgaacaacagttttatttggagagttcggaagagcctcgggtcccagtacgggcggacagatgcagaggtggttggatgaagagagcatacgattggatggagagcaccggtgttgtcacgggcggacatttcagacagaggggtgtgtgcagaccatatgcattctatccatgtggacatcacgaggatcagaaatactatggaccatgtccgcaggggtcatggccgactccgagatgtcgaaagacgtgtcagcgcggatataataaatcctacgcagatgacaagtacttcgcaacgaaatcctattatctcccgaaggatgaaaagaagatcaggcaagagatctacaaaaatgggcctgttgtagctggatttgatgtctacacggacttcttgcactacaagaaagggatttacgtgcacacatcaggttacaaatcaggagcacatgcggtaaaagttattggctggggtcgtgaaaatggaacagattactggctgattgcaaactcatggaattccgactggggagacaatggtatgtacttttcaatatcatcactctatagcaatttcaaaccacctagagtcatagcgttcaggctacttccgcatacttcgtggaaagaaccactgtggtatcgaagaatcgatggttggaggactcatgaaagtataaagtgctcgataacaacgtatttcatccgagcgcgaaaatga

SEQ ID NO: 477 - DNA, 1446 bp, Ancylostoma ceylanicum
atgtggattctcttcgtattggtggttacggcatttgccgcgaagccgactacgattgaggagttcctcgccagacccaaaacagagcctgctcagccccttactggacaagctctcgtagactacgtcaatgaacaacaatcattcttccaggctgaatataatcagcaagcagaagaactcgcgaaattccggttaatggagccggagttcctcgtgaaaccaaagaaagaagaagtgttgtcagatgtatatggtgacgagccacctgagagtttacagttgttaaaaaaaatacttgcctccggcatccacgcccgtctgctaagacacgccgcgcctcctgcattatcatacgtgctgcgacatggctcagtcgacgcgcaggcttcgacgcccgcgaccattggaaagattgcaaatcgatcggcactattcgtgaccagtcagcttgcggtatgtcaaacgaagtcaacttcttcttcaaagttcatgttgggcagtttcgtcagcggaagctatgtcggatcaactgtgtgtgcagtcgaacggcaggataaagtggaaggtgaggatacgttaggaatgccgccatatcagaacagacagcggaactcatgcctcttcggattcaaccgaataggatcttctgaagatcaggaaagtatacgacaaaacacagcggcgaaatgtcttatatctggtcttgcaaaagtgagccaatcttgtatgatgctggtatcatgggctatgcgagatgaaataataataaaaacactcagatgcagaggtggttggatgaagagagcatacgattggatggagagcaccggtgttgtcacgggcggacatttcagacagaggggtgtgtgcagaccatatgcattctatccatgtggacatcacgaggatcagaaatactatggaccatgtccgcaggggtcatggccgactccgagatgtcgaaagacgtgtcagcgcggatataataaatcctacgcagatgacaagtacttcgcaacgaaatcctattatctcccgaaggatgaaaagaagatcaggcaagagatctacaaaaatgggcctgttgtagctggatttgatgtctacacggacttcttgcactacaagaaagggatttacgtgcacacatcaggttacaaatcaggagcacatgcggtaaaagttattggctggggtcgtgaaaatggaacagattactggctgattgcaaactcatggaattccgactggggagacaatggtatgtacttttcaatatcatcactctatagcaatttcaaaccacctagagtcatagcgttcaggctacttccgcatacttcgtggaaagaaccactgtggtatcgaagaatcgatggttggaggactcatgaaagtataaagtgctcgataacaacgtatttcatccgagcgcgaaaatga

SEQ ID NO: 478 - DNA, 1431 bp, Ancylostoma ceylanicum
atgtggattctcttcgtattggtggttacggcatttgccgcgaagccgactacgattgaggagttcctcgccagacccaaaacagagcctgctcagccccttactggacaagctctcgtagactacgtcaatgaacaacaatcattcttccaggctgaatataatcagcaagcagaagaactcgcgaaattccggttaatggagccggagttcctcgtgaaaccaaagaaagaagaagtgttgtcagatgtatatggtgacgagccacctgagagtttacagttgttaaaaaaaatacttgcctccggcatccacgcccgtctgctaagacacgccgcgcctcctgcattatcatacgtgctgcgacatggctcagtcgacgcgcaggcttcgacgcccgcgaccattggaaagattgcaaatcgatcggcactattcgtgaccagtcagcttgcggtatgtcaaacgaagtcaacttcttcttcaaagttcatgttgggcagtttcgtcagcggaagctatgtcggatcaactgtgtgtgcagtcgaacggcaggataaagtggaaggtgaggatacgttaggaatgccgccatatcagaacagacagcggaactcatgcctcttcggattcaaccgaataggatcttctgaagatcaggaaagtatacgacaaaacacagcggcgaaatgtcttatatctggtcttgcaaaagtgctcatctctgacacggatatcctatcatgctgtaacacctgtggctatggatgcagaggtggttggatgaagagagcatacgattggatggagagcaccggtgttgtcacgggcggacatttcagacagaggggtgtgtgcagaccatatgcattctatccatgtggacatcacgaggatcagaaatactatggaccatgtccgcaggggtcatggccgactccgagatgtcgaaagacgtgtcagcgcggatataataaatcctacgcagatgacaagtacttcgcaacgaaatcctattatctcccgaaggatgaaaagaagatcaggcaagagatctacaaaaatgggcctgttgtagctggatttgatgtctacacggacttcttgcactacaagaaagggatttacgtgcacacatcaggttacaaatcaggagcacatgcggtaaaagttattggctggggtcgtgaaaatggaacagattactggctgattgcaaactcatggaattccgactggggagacaatggtatgtacttttcaatatcatcactctatagcaatttcaaaccacctagagtcatagcgttcaggctacttccgcatacttcgtggaaagaaccactgtggtatcgaagaatcgatggttggaggactcatgaaagtataaagtgctcgataacaacgtatttcatccgagcgcgaaaatga

SEQ ID NO: 479 - DNA, 846 bp, Ancylostoma ceylanicum
atgccgccatatcagaacagacagcggaactcatgcctcttcggattcaaccgaataggatcttctgaagatcaggaaagtatacgacaaaacacagcggcgaaatgtcttatatctggtcttgcaaaagtgctcatctctgacacggatatcctatcatgctgtaacacctgtggctatggatgcagaggtggttggatgaagagagcatacgattggatggagagcaccggtgttgtcacgggcggacatttcagacagaggggtgtgtgcagaccatatgcattctatccatgtggacatcacgaggatcagaaatactatggaccatgtccgcaggggtcatggccgactccgagatgtcgaaagacgtgtcagcgcggatataataaatcctacgcagatgacaagtacttcgcaacgaaatcctattatctcccgaaggatgaaaagaagatcaggcaagagatctacaaaaatgggcctgttgtagctggatttgatgtctacacggacttcttgcactacaagaaagggatttacgtgcacacatcaggttacaaatcaggagcacatgcggtaaaagttattggctggggtcgtgaaaatggaacagattactggctgattgcaaactcatggaattccgactggggagacaatggtatgtacttttcaatatcatcactctatagcaatttcaaaccacctagagtcatagcgttcaggctacttccgcatacttcgtggaaagaaccactgtggtatcgaagaatcgatggttggaggactcatgaaagtataaagtgctcgataacaacgtatttcatccgagcgcgaaaatga

SEQ ID NO: 480 - DNA, 438 bp, Ancylostoma ceylanicum
atgcagctcctgctggtgtcagtggctgctcttgtggcggtggctttttccgagaagctagcacctactcctcccttgttgagaacaaagcactcactgagacagaaactactggatcaagaacccagcgatgacgtcacgagccaatatccatggttgcaacgattaacgtttaaacaaaagttggatcactttaatccaaccaatacggatacatggaatcagcgctattactataatccgaagtatgccaggaacacctccattatattcttaatgatcggaggcgaaggtcctgaagatggcaaatgggcagcaaaaccagacattcaatatctacaatgggctcaggagtacggcgcccacgtgttcgatttggagcacagatttttcggagacagttggccaaagccgtatgtgacacgttccattccttga

SEQ ID NO: 481 - DNA, 1164 bp, Ancylostoma ceylanicum
atggattcaaaaatcccagatgggtcacatttggtggaagttacccaggtaagtctttcttttctctccaaaaaatccagttctattacaccacatgttttatgctccttatccgcctggttccgctccaagtatccagaatggaccgtaggagcagtcgctagtagcgcaccattaaatctgaagattgacttctttgagtacgcacaagttgtcgaggatgatctcaccgtgactaacaaggattgtcctggcaatgttagagatgcattccagaaaatgcaggtgctcagcaacagctctgatggacttaaccagttgaacaaatattttaaccttcaacctccattcgacaaaaacactacccagagagatatcacaaattttttcgcgaatgtcttcggtgtattccaaagcatgagccagtacacttatgacggaaggaatggtgagtcgcagaagaacttgactgatgccaaagtatgcgaaatcatgatggatactaaggagccggatgtgatcaaacgagtttacaacgtctatctctggtacaacggaataacaggcgatccaaaaactgatctcacagtgttcccgaacagctacagcgacatgattgcctcggtgaaaactggaaatcttactcttcttggagaagataatgccgctgctagaggatggatgtggctgtgttgcaatgaagtcggatttatgcaaacaacagaaggtggcattttcgggaaaaccgtcccactgcagtactacattgacatgtgcacggacatgttcgacgcttccgtgacgctagactatttaactcctaggaataaagcagctcaaagttactacggcggcagtgataagtatacagcaagcaatgtcgtgctaccgaacggctcccttgatccatggcatgcactcggatgttacctcaacaatactgccaccacgtatccgatactgatcaatggtactgcacattgttcggatatgtatcctgcgtatgacggagaaccatcagctctggttggtgtacgtgcacagatcaaaggacacgtgagagatttcataaagtacgaccctgttgctgatggacctggaggaagtggcttttccatttcacttttcacttcgttcttgattcttttgttgtcccgtatgtaa

SEQ ID NO: 482 - DNA, 1575 bp, Ancylostoma ceylanicum
atgcagctcctgctggtgtcagtggctgctcttgtggcggtggctttttccgagaagctagcacctactcctcccttgttgagaacaaagcactcactgagacagaaactactggatcaagaacccagcgatgacgtcacgagccaatatccatggttgcaacgattaacgtttaaacaaaagttggatcactttaatccaaccaatacggatacatggaatcagcgctattactataatccgaagtatgccaggaacacctccattatattcttaatgatcggaggcgaaggtcctgaagatggcaaatgggcagcaaaaccagacattcaatatctacaatgggctcaggagtacggcgcccacgtgttcgatttggagcacagatttttcggagacagttggccaaagccgaacatggacttcgcctcgttgagcctccttaccaccgagcaagcgctcgctgatctagcctacttcatcacatcaatgaatcagaagtatggattcaaaaatcccagatgggtcacatttggtggaagttacccagaatggaccgtaggagcagtcgctagtagcgcaccattaaatctgaagattgacttctttgagtacgcacaagttgtcgaggatgatctcaccgtgactaacaaggattgtcctggcaatgttagagatgcattccagaaaatgcaggtgctcagcaacagctctgatggacttaaccagttgaacaaatattttaaccttcaacctccattcgacaaaaacactacccagagagatatcacaaattttttcgcgaatgtcttcggtgtattccaaagcatgagccagtacacttatgacggaaggaatggtgagtcgcagaagaacttgactgatgccaaagtatgcgaaatcatgatggatactaaggagccggatgtgatcaaacgagtttacaacgtctatctctggtacaacggaataacaggcgatccaaaaactgatctcacagtgttcccgaacagctacagcgacatgattgcctcggtgaaaactggaaatcttactcttcttggagaagataatgccgctgctagaggatggatgtggctgtgttgcaatgaagtcggatttatgcaaacaacagaaggtggcattttcgggaaaaccgtcccactgcagtactacattgacatgtgcacggacatgttcgacgcttccgtgacgctagactatttaactcctaggaataaagcagctcaaagttactacggcggcagtgataagtatacagcaagcaatgtcgtgctaccgaacggctcccttgatccatggcatgcactcggatgttacctcaacaatactgccaccacgtatccgatactgatcaatggtactgcacattgttcggatatgtatcctgcgtatgacggagaaccatcagctctggttggtgtacgtgcacagatcaaaggacacgtgagagatttcataaagtacgaccctgttgctgatggacctggaggaagtggcttttccatttcacttttcacttcgttcttgattcttttgttgtcccgtatgtaa

SEQ ID NO: 483 - DNA, 1158 bp, Ancylostoma ceylanicum
atggacttcgcctcgttgagcctccttaccaccgagcaagcgctcgctgatctagcctacttcatcacatcaatgaatcagaagtatggattcaaaaatcccagatgggtcacatttggtggaagttacccagaatggaccgtaggagcagtcgctagtagcgcaccattaaatctgaagattgacttctttgagtacgcacaagttgtcgaggatgatctcaccgtgactaacaaggattgtcctggcaatgttagagatgcattccagaaaatgcaggtgctcagcaacagctctgatggacttaaccagttgaacaaatattttaaccttcaacctccattcgacaaaaacactacccagagagatatcacaaattttttcgcgaatgtcttcggtgtattccaaagcatgagccagtacacttatgacggaaggaatggtgagtcgcagaagaacttgactgatgccaaagtatgcgaaatcatgatggatactaaggagccggatgtgatcaaacgagtttacaacgtctatctctggtacaacggaataacaggcgatccaaaaactgatctcacagtgttcccgaacagctacagcgacatgattgcctcggtgaaaactggaaatcttactcttcttggagaagataatgccgctgctagaggatggatgtggctgtgttgcaatgaagtcggatttatgcaaacaacagaaggtggcattttcgggaaaaccgtcccactgcagtactacattgacatgtgcacggacatgttcgacgcttccgtgacgctagactatttaactcctaggaataaagcagctcaaagttactacggcggcagtgataagtatacagcaagcaatgtcgtgctaccgaacggctcccttgatccatggcatgcactcggatgttacctcaacaatactgccaccacgtatccgatactgatcaatggtactgcacattgttcggatatgtatcctgcgtatgacggagaaccatcagctctggttggtgtacgtgcacagatcaaaggacacgtgagagatttcataaagtacgaccctgttgctgatggacctggaggaagtggcttttccatttcacttttcacttcgttcttgattcttttgttgtcccgtatgtaa

SEQ ID NO: 484 - DNA, 1281 bp, Ancylostoma ceylanicum
atgcatatctcgctggctctgcttgccttggtgggctgcgccatggctggcgtgcaccagatctccctcgtcaaggtggaatcgttgaggaagaggatgttccgtgaaggtacatggacaaggcacgttcaaatgaagcatgctgcaaggagtatgcgtttcatggcagcgccaggtggacgtgggccatatcatgagcaggtcagcgactatgaagacgccgaatatctcgggaacatcaccattggaacacctgagcaacaattcagggtgattctggatacgggttcggcaaatttgtgggtccctgacaagacatgcgggcagaacaaagacggctgtgactctggactatgcagcataccacagctctgcccatatttgtgccccaaccccaactgctgcagtggtggtggtggagctaatccatgcgacggtaaaagcaagttcgactcagacttgtccaagacattcgttaaggatggacgaagatggagtatccagtacggtactggatcggcagcaggatttctgggacaagataccgtgagatttggatcgcctggcacaaaccagctagtagttcctggcaccgtcttcgggcaagcgaccagtctggctcctttcttcgctggacaaccgatcgatggcattctcggcctggccttcaaatccatcgctgtcgacggcgtcacgccgccgttcctgaaagccgtcgatgatggcctcgttgaccagccggtctttacggttttcctggagcatgtaggggacgagcagaatgtccccggcggagtgtacacctacggtggcattgatgagaaaaactgtggtgaagtgatagcttacgaaccgctgtcggctaccacatactggcagtttaagatgaaaggagtcaagtcaggaacatatagccagcaaaaaacttggcaagtgatctccgacaccggtacctcgctaatcgctgcaccgttggctgtagctcaatccatcgccagcaaagctggaggaaaatacgatgcacagtacggcgtctattttgtggaatgcgacgcaaagccaagtctagaactcacaatcggtgagaagaactacgaaattagcgcggccaacttcgtcgttccatctggagacggtcgatgcttgttggcaatctttggaacgcctggatttggtatgggaccatcgtggattctcggcgatccgttcattcgtgaattctgcaacatctacgatgtcggcaagaagcagatcggatttgcaaaatccaagcagaagtaa

SEQ ID NO: 485 - DNA, 1239 bp, Ancylostoma ceylanicum
atggctggcgtgcaccagatctccctcgtcaaggtggaatcgttgaggaagaggatgttccgtgaaggtacatggacaaggcacgttcaaatgaagcatgctgcaaggagtatgcgtttcatggcagcgccaggtggacgtgggccatatcatgagcaggtcagcgactatgaagacgccgaatatctcgggaacatcaccattggaacacctgagcaacaattcagggtgattctggatacgggttcggcaaatttgtgggtccctgacaagacatgcgggcagaacaaagacggctgtgactctggactatgcagcataccacagctctgcccatatttgtgccccaaccccaactgctgcagtggtggtggtggagctaatccatgcgacggtaaaagcaagttcgactcagacttgtccaagacattcgttaaggatggacgaagatggagtatccagtacggtactggatcggcagcaggatttctgggacaagataccgtgagatttggatcgcctggcacaaaccagctagtagttcctggcaccgtcttcgggcaagcgaccagtctggctcctttcttcgctggacaaccgatcgatggcattctcggcctggccttcaaatccatcgctgtcgacggcgtcacgccgccgttcctgaaagccgtcgatgatggcctcgttgaccagccggtctttacggttttcctggagcatgtaggggacgagcagaatgtccccggcggagtgtacacctacggtggcattgatgagaaaaactgtggtgaagtgatagcttacgaaccgctgtcggctaccacatactggcagtttaagatgaaaggagtcaagtcaggaacatatagccagcaaaaaacttggcaagtgatctccgacaccggtacctcgctaatcgctgcaccgttggctgtagctcaatccatcgccagcaaagctggaggaaaatacgatgcacagtacggcgtctattttgtggaatgcgacgcaaagccaagtctagaactcacaatcggtgagaagaactacgaaattagcgcggccaacttcgtcgttccatctggagacggtcgatgcttgttggcaatctttggaacgcctggatttggtatgggaccatcgtggattctcggcgatccgttcattcgtgaattctgcaacatctacgatgtcggcaagaagcagatcggatttgcaaaatccaagcagaagtaa

SEQ ID NO: 486 - DNA, 660 bp, Ancylostoma ceylanicum
atgcatatctcgctggctctgcttgccttggtgggctgcgccatggctggcgtgcaccagatctccctcgtcaaggtggaatcgttgaggaagaggatgttccgtgaaggtacatggacaaggcacgttcaaatgaagcatgctgcaaggagtatgcgtttcatggcagcgccaggtggacgtgggccatatcatgagcaggtcagcgactatgaagacgccgaatatctcgggaacatcaccattggaacacctgagcaacaattcagggtgattctggatacgggttcggcaaatttgtgggtccctgacaagacatgcgggcagaacaaagacggctgtgactctggactatgcagcataccacagctctgcccatatttgtgccccaaccccaactgctgcagtggtggtggtggagctaatccatgcgacggtaaaagcaagttcgactcagacttgtccaagacattcgttaaggatggacgaagatggagtatccagtacggtactggatcggcagcaggatttctgggacaagataccgtgagatttggatcgcctggcacaaaccagctagtagttcctggcaccgtcttcgggcaagcgaccagtctggctcctttcttcgctggagtgagtacaacatgggggatatag

SEQ ID NO: 487 - DNA, 618 bp, Ancylostoma ceylanicum
atggctggcgtgcaccagatctccctcgtcaaggtggaatcgttgaggaagaggatgttccgtgaaggtacatggacaaggcacgttcaaatgaagcatgctgcaaggagtatgcgtttcatggcagcgccaggtggacgtgggccatatcatgagcaggtcagcgactatgaagacgccgaatatctcgggaacatcaccattggaacacctgagcaacaattcagggtgattctggatacgggttcggcaaatttgtgggtccctgacaagacatgcgggcagaacaaagacggctgtgactctggactatgcagcataccacagctctgcccatatttgtgccccaaccccaactgctgcagtggtggtggtggagctaatccatgcgacggtaaaagcaagttcgactcagacttgtccaagacattcgttaaggatggacgaagatggagtatccagtacggtactggatcggcagcaggatttctgggacaagataccgtgagatttggatcgcctggcacaaaccagctagtagttcctggcaccgtcttcgggcaagcgaccagtctggctcctttcttcgctggagtgagtacaacatgggggatatag

SEQ ID NO: 488 - DNA, 597 bp, Ancylostoma ceylanicum
atgtggatcatactagcgcttgtatatgtactcccactgtcagcagcacatgcgctgaacatgactgtgaagctacatggaactggatctctgattgcaaagtttatcgaagaaaatcgatatgacgattatctgagacttctcgaagaacaagaacgcaacagaactaaaggaagatactggacttggcaggcactatcttcatggtatgacgaattctaccttggcgaggttaaagtcggcacaccggctcaaacattctggctttctatggacacaggctcatctgcaatgtggttgattgatggtgcctgcaatcatccaatttgcaacggttaccctaacagtggacggaagaagaacaaattttactatggcaaatcaagcactttcaaacgaacaagcgataaattctctctgaactatggaaccggatgggctgcaggttttactggagcggacaacatcagatatggatgtatgttgcagcttgttcgttgcttgttaatgtctcttagttgctatctagctgaaagtagactttcacgcagtcgattaccgctaatactaatgctagaggcttactggcatcaataa

SEQ ID NO: 489 - DNA, 609 bp, Ancylostoma ceylanicum
atgcttacagatatgtggatcatactagcgcttgtatatgtactcccactgtcagcagcacatgcgctgaacatgactgtgaagctacatggaactggatctctgattgcaaagtttatcgaagaaaatcgatatgacgattatctgagacttctcgaagaacaagaacgcaacagaactaaaggaagatactggacttggcaggcactatcttcatggtatgacgaattctaccttggcgaggttaaagtcggcacaccggctcaaacattctggctttctatggacacaggctcatctgcaatgtggttgattgatggtgcctgcaatcatccaatttgcaacggttaccctaacagtggacggaagaagaacaaattttactatggcaaatcaagcactttcaaacgaacaagcgataaattctctctgaactatggaaccggatgggctgcaggttttactggagcggacaacatcagatatggatgtatgttgcagcttgttcgttgcttgttaatgtctcttagttgctatctagctgaaagtagactttcacgcagtcgattaccgctaatactaatgctagaggcttactggcatcaataa

SEQ ID NO: 490 - DNA, 555 bp, Ancylostoma ceylanicum
atgcttacagatatgtggatcatactagcgcttgtatatgtactcccactgtcagcagcacatgcgctgaacatgactgtgaagctacatggaactggatctctgattgcaaagtttatcgaagaaaatcgatatgacgattatctgagacttctcgaagaacaagaacgcaacagaactaaaggaagatactggacttggcaggcactatcttcatggtatgacgaattctaccttggcgaggttaaagtcggcacaccggctcaaacattctggctttctatggacacaggctcatctgcaatgtggttgattgatggtgcctgcaatcatccaatttgcaacggttaccctaacagtggacggaagaagaacaaattttactatggcaaatcaagcactttcaaacgaacaagcgataaattctctctgaactatggaaccggatgggctgcaggttttactggagcggacaacatcagatatggatgtatgttgcagcttgttgagagacgcaggacgcaaaagatgactaactcggttttgcgtccatga

SEQ ID NO: 491 - DNA, 543 bp, Ancylostoma ceylanicum
atgtggatcatactagcgcttgtatatgtactcccactgtcagcagcacatgcgctgaacatgactgtgaagctacatggaactggatctctgattgcaaagtttatcgaagaaaatcgatatgacgattatctgagacttctcgaagaacaagaacgcaacagaactaaaggaagatactggacttggcaggcactatcttcatggtatgacgaattctaccttggcgaggttaaagtcggcacaccggctcaaacattctggctttctatggacacaggctcatctgcaatgtggttgattgatggtgcctgcaatcatccaatttgcaacggttaccctaacagtggacggaagaagaacaaattttactatggcaaatcaagcactttcaaacgaacaagcgataaattctctctgaactatggaaccggatgggctgcaggttttactggagcggacaacatcagatatggatgtatgttgcagcttgttgagagacgcaggacgcaaaagatgactaactcggttttgcgtccatga

SEQ ID NO: 492 - DNA, 552 bp, Ancylostoma ceylanicum
atgaaccaacaacagtttggtgtggctaactctctcggtccatttttcggaacagctcctatggacggaatttttggtctcaacgggttcaacgagtatccaaatctaaatgccccgatgccgtcagtgaagcactttatggataaacagcagtttactgtctggatgaatagaagggtgagacagtttggtcatttacagcatggcaggcatgctaattccttatgcaatttcttaatcaaaaatagatttctgaagtttcaggttgccatcagtaaaggagcaattggaggttacatcacgtacggtgcttacgacaaaaccaattgtgaaccgcaaatttactacgcaccattggcagtggctaacagatggattgtcaatatcgcaggattcagtatagggtccttcacccgcactgctaatgagcatgtacgactgcagtgtttagaaactgcatcacaggatattaagcacatgttcttcaggccatatccgacactggtacaacatggattggtgttccaaaaggggttctcgacaatattctaa

SEQ ID NO: 493 - DNA, 465 bp, Ancylostoma ceylanicum
atgaaccaacaacagtttggtgtggctaactctctcggtccatttttcggaacagctcctatggacggaatttttggtctcaacgggttcaacgagtatccaaatctaaatgccccgatgccgtcagtgaagcactttatggataaacagcagtttactgtctggatgaatagaagggttgccatcagtaaaggagcaattggaggttacatcacgtacggtgcttacgacaaaaccaattgtgaaccgcaaatttactacgcaccattggcagtggctaacagatggattgtcaatatcgcaggattcagtatagggtccttcacccgcactgctaatgagcatgtacgactgcagtgtttagaaactgcatcacaggatattaagcacatgttcttcaggccatatccgacactggtacaacatggattggtgttccaaaaggggttctcgacaatattctaa

SEQ ID NO: 494 - DNA, 246 bp, Ancylostoma ceylanicum
atgcagacgctaccaagaatggtattccatattgctggtcggaaattcacagtgccttcagtgcaatatgtcttgaatctgaaccttggaaatggccagtgcgtgttggctgtattcgcagtcgattccggagccttcggcgcacagttcatcctcggccaaccgttcattcgcactttttgtcagacatatgacatcgctaacaaaagaatcggcatatccgttgcacgacctcaaaaaacctaa

SEQ ID NO: 495 - DNA, 654 bp, Ancylostoma ceylanicum
atgcagcagtttttccaggaattccttgaagaattaaccgatcactatcaagattaccttagaattcttgatgagcaagaacggaacagaactaaagggcgatactggacatggcaagtactctctacatggtatgacgagttctaccttggcgaagttaaagtcggcacaccggcatatgctgtgaaacaacaacaaattggtgtggccaactctcttggcccattcttcggaacggctcccatggatggcgtattcggtctcggattcaaccagtatccaaatgccatttctgatacgggtacaacgtggataggtgtcccaaccgccgttctcaataatattctgtggcaaacgcaggcttggtgggatcccaatcgaagactctacattattccatgttccaagatgtggacactacctccaatgattttcaatgttgctggtcaaagatttacggtgccttcagtgcaatatgtcttagatctgagccttggaaatggccagtgcgtgatggctatgctcgcagtcgattccgcagccttcggagctcagttcatactcggccaaccatttattcgcactttctgtcaaacatatgacattgctaacaaaagaatcggcatatctgttgcacgacctcaaacaaaataa

SEQ ID NO: 496 - DNA, 759 bp, Ancylostoma ceylanicum
atggacacaggctcatctgtaatatggttgattgatggtgcctgtactcacccaatttgcaacggttactctaacagtggacggactaagaacaaatttcactacgacaaatcgagcactttcaaacgcacaagtgatgcattctctctgaactatggaaccggatgggtcagtggttttacaggagtggacgacataagctatggaacatatgctgtgaaacaacaacaaattggtgtggccaactctcttggcccattcttcggaacggctcccatggatggcgtattcggtctcggattcaaccagtatccaaatttaaatgcaccgatgccaacagtggcgcaatccatgcatcgccagcagttcaccgtttggatgaatagaagggccatttctgatacgggtacaacgtggataggtgtcccaaccgccgttctcaataatattctgtggcaaacgcaggcttggtgggatcccaatcgaagactctacattattccatgttccaagatgtggacactacctccaatgattttcaatgttgctggtcaaagatttacggtgccttcagtgcaatatgtcttagatctgagccttggaaatggccagtgcgtgatggctatgctcgcagtcgattccgcagccttcggagctcagttcatactcggccaaccatttattcgcactttctgtcaaacatatgacattgctaacaaaagaatcggcatatctgttgcacgacctcaaacaaaataa

SEQ ID NO: 497 - DNA, 726 bp, Ancylostoma ceylanicum
atgcagcagtttttccaggaattccttgaagaattaaccgatcactatcaagattaccttagaattcttgatgagcaagaacggaacagaactaaagggcgatactggacatggcaagtactctctacatggtatgacgagttctaccttggcgaagttaaagtcggcacaccggcatatgctgtgaaacaacaacaaattggtgtggccaactctcttggcccattcttcggaacggctcccatggatggcgtattcggtctcggattcaaccagtatccaaatttaaatgcaccgatgccaacagtggcgcaatccatgcatcgccagcagttcaccgtttggatgaatagaagggccatttctgatacgggtacaacgtggataggtgtcccaaccgccgttctcaataatattctgtggcaaacgcaggcttggtgggatcccaatcgaagactctacattattccatgttccaagatgtggacactacctccaatgattttcaatgttgctggtcaaagatttacggtgccttcagtgcaatatgtcttagatctgagccttggaaatggccagtgcgtgatggctatgctcgcagtcgattccgcagccttcggagctcagttcatactcggccaaccatttattcgcactttctgtcaaacatatgacattgctaacaaaagaatcggcatatctgttgcacgacctcaaacaaaataa

SEQ ID NO: 498 - DNA, 927 bp, Ancylostoma ceylanicum
atggacacaggctcatctgtaatatggttgattgatggtgcctgtactcacccaatttgcaacggttactctaacagtggacggactaagaacaaatttcactacgacaaatcgagcactttcaaacgcacaagtgatgcattctctctgaactatggaaccggatgggtcagtggttttacaggagtggacgacataagctatggaacatatgctgtgaaacaacaacaaattggtgtggccaactctcttggcccattcttcggaacggctcccatggatggcgtattcggtctcggattcaaccagtatccaaatttaaatgcaccgatgccaacagtggcgcaatccatgcatcgccagcagttcaccgtttggatgaatagaagggtagccgtcagcagaggagcggttggaggttacatcacgtatggtgcttatgacactaccaattgtgcgccacaaatttattacgcaccactggctgttgataacaaatggataatcaatatcgcgggattcagtattggctcttttactcacaccgctaatcaatatgccatttctgatacgggtacaacgtggataggtgtcccaaccgccgttctcaataatattctgtggcaaacgcaggcttggtgggatcccaatcgaagactctacattattccatgttccaagatgtggacactacctccaatgattttcaatgttgctggtcaaagatttacggtgccttcagtgcaatatgtcttagatctgagccttggaaatggccagtgcgtgatggctatgctcgcagtcgattccgcagccttcggagctcagttcatactcggccaaccatttattcgcactttctgtcaaacatatgacattgctaacaaaagaatcggcatatctgttgcacgacctcaaacaaaataa

SEQ ID NO: 499 - DNA, 1287 bp, Ancylostoma ceylanicum
atgtgccgaaatttctgctgtttgatgccttgttcagcagtacagtttcctccacgcccaaaaaagcaacgactgagaagtgatcttcaccaatctgatatgtggataagtcttctgcttgcaactgtgctctcaacagcatgcgctcagaacatgactatgaaactcgtcggaaccggatcactcattgcgaagttcatgaaagcaaatcgctatgacgactacctgagacttattgatgaacaagagcgaagcagaagtaacggaagatactggacatggcagtcacttgcttcgtggtacgacgaatattaccttggagaggttaacgtgggaacgcctgctcaaaaattctacctgtctatggacacaggctcttctgcaatgtggctaattgatggcgcctgcactcatccaatttgcaacggctacgctactagtggacggactaagaacaaattttactatggcaaatccacgacattcgagaaaacaagcgaaaagttttctataaactacgggaccggatgggccggcggttttattggagtagacgacatcacttatggaacatatgtggtgaaacaacaattcggtgtggctaactctctcggtccattcttcggaacagctcctatggacggaattttcggccttggattcaacgagtacgaaaatttgaatgctccgatgccaacagtgaagcatttcatggacaagcagcaattcactgtctggatgaatagaagggtagccatcagtaaaggagctgttggaggctatatcacatacggtgcttacgacaaaaccaattgtgcagcaaaaatttattacgcaccattggctgtggagaacaagtggattatcaacatcgctggatttggcatcggaaaatacacccatactgctgatcagcacgccatatccgacactggtacaacatggataggtgtcccgaatgcggttctcaataatattctgtggcaaacgaagagtagttgggatgcgagcaggaagctctacaccattccatgttctaaaatgtacaaactaccgaatatggtctttcatatcgcaggagtccaattcacagtaccttcggcgcagtacgttctcgatctgaatctcggaaaaggacagtgtgtgatggccatcttcgcggtcgattccgcagccttcggtgcgcagttcattcttggtcaaccgttcattcgtacattctgccaaacatatgatattgaaaaccaaaggataggcatttctattgctacacctcagaaaacataa

SEQ ID NO: 500 - DNA, 1263 bp, Ancylostoma ceylanicum
atgccttgttcagcagtacagtttcctccacgcccaaaaaagcaacgactgagaagtgatcttcaccaatctgatatgtggataagtcttctgcttgcaactgtgctctcaacagcatgcgctcagaacatgactatgaaactcgtcggaaccggatcactcattgcgaagttcatgaaagcaaatcgctatgacgactacctgagacttattgatgaacaagagcgaagcagaagtaacggaagatactggacatggcagtcacttgcttcgtggtacgacgaatattaccttggagaggttaacgtgggaacgcctgctcaaaaattctacctgtctatggacacaggctcttctgcaatgtggctaattgatggcgcctgcactcatccaatttgcaacggctacgctactagtggacggactaagaacaaattttactatggcaaatccacgacattcgagaaaacaagcgaaaagttttctataaactacgggaccggatgggccggcggttttattggagtagacgacatcacttatggaacatatgtggtgaaacaacaattcggtgtggctaactctctcggtccattcttcggaacagctcctatggacggaattttcggccttggattcaacgagtacgaaaatttgaatgctccgatgccaacagtgaagcatttcatggacaagcagcaattcactgtctggatgaatagaagggtagccatcagtaaaggagctgttggaggctatatcacatacggtgcttacgacaaaaccaattgtgcagcaaaaatttattacgcaccattggctgtggagaacaagtggattatcaacatcgctggatttggcatcggaaaatacacccatactgctgatcagcacgccatatccgacactggtacaacatggataggtgtcccgaatgcggttctcaataatattctgtggcaaacgaagagtagttgggatgcgagcaggaagctctacaccattccatgttctaaaatgtacaaactaccgaatatggtctttcatatcgcaggagtccaattcacagtaccttcggcgcagtacgttctcgatctgaatctcggaaaaggacagtgtgtgatggccatcttcgcggtcgattccgcagccttcggtgcgcagttcattcttggtcaaccgttcattcgtacattctgccaaacatatgatattgaaaaccaaaggataggcatttctattgctacacctcagaaaacataa

SEQ ID NO: 501 - DNA, 1278 bp, Ancylostoma ceylanicum
atgagagctctaatttttataactatcatcaccacttctgtggacgctttgaatttcacaatggatattcataattacggatcactccgtgataatctcatagcctccggaaaccttaccgattttctggaaaaacaaaatcagcatcgatatagcaacttgtttacgcatcagcgaccgctttacgattacttcgaccaattttacctggggactgtgaacattggaacacccgcccaagtattttatctatccatggatactggctcggccaacatgtgggttattgcccagggatgtgcacagcctcaatgtaatggatatccatcaagctatcgaccaaagctgaagtacagaccaggtgcctcatcaacatttaagaaggtgccacaaggattctacatgtactatcacactggttcagtcagtggatactatgccagggacagaattaactttgcaggagtcaggatagagaatcagaagtttggtgtcgccactgccattgccaacgtctttggttatcaaccaattgatgggatcttcggccttgcatggccttcgcttgcagtgggggatgtgaaaaccccaatggaagctctactaccacagttagatcagaaactcttcactgtttggctgggacgaaggacaacaactgcatatggagctttggctggatccatagtatacggagcgttagacccaactcattgcgctgcacaaatcaattgggtgccactttctcgtgcccaatactggcagtttccgatccagcgctttcaactcggccagttcattaggaactccgttgaccaggtcatcacagacactggcacatcatttattggagcgccgatgggcgttttgaatggaatcattcaaatgaccggagcgaaatacagcgccaagaatcaaatctatgtcgttccatgtacaacaatgttccggcaaccaaatgccctatttacaatcaacggcaaccagtatgtcatcccgtcatcccagtatgtgctcgacctgaaacttggaaatggatacgtaagtctacattcgctcaatgttccaactcattttttttttgaggaagcgattttctcctttgcaataggtggtgtcattgtcgttgttcccaccacgtcctttttcagtgtgccctggcgttcttcggaattcaagctggaggttttggcacaccttggatcctgggagatcctttcatccgaacctattgccacgttcatgatttcgaaaacaaacgcattgggctctcattag

SEQ ID NO: 502 - DNA, 1182 bp, Ancylostoma ceylanicum
atgagagctctaatttttataactatcatcaccacttctgtggacgctttgaatttcacaatggatattcataattacggatcactccgtgataatctcatagcctccggaaaccttaccgattttctggaaaaacaaaatcagcatcgatatagcaacttgtttacgcatcagcgaccgctttacgattacttcgaccaattttacctggggactgtgaacattggaacacccgcccaagtattttatctatccatggatactggctcggccaacatgtgggttattgcccagggatgtgcacagcctcaatgtaatggatatccatcaagctatcgaccaaagctgaagtacagaccaggtgcctcatcaacatttaagaaggtgccacaaggattctacatgtactatcacactggttcagtcagtggatactatgccagggacagaattaactttgcaggagtcaggatagagaatcagaagtttggtgtcgccactgccattgccaacgtctttggttatcaaccaattgatgggatcttcggccttgcatggccttcgcttgcagtgggggatgtgaaaaccccaatggaagctctactaccacagttagatcagaaactcttcactgtttggctgggacgaaggacaacaactgcatatggagctttggctggatccatagtatacggagcgttagacccaactcattgcgctgcacaaatcaattgggtgccactttctcgtgcccaatactggcagtttccgatccagcgctttcaactcggccagttcattaggaactccgttgaccaggtcatcacagacactggcacatcatttattggagcgccgatgggcgttttgaatggaatcattcaaatgaccggagcgaaatacagcgccaagaatcaaatctatgtcgttccatgtacaacaatgttccggcaaccaaatgccctatttacaatcaacggcaaccagtatgtcatcccgtcatcccagtatgtgctcgacctgaaacttggaaatggatactgtgccctggcgttcttcggaattcaagctggaggttttggcacaccttggatcctgggagatcctttcatccgaacctattgccacgttcatgatttcgaaaacaaacgcattgggctctcattagcgaagaatatgtaa

SEQ ID NO: 503 - DNA, 1182 bp, Ancylostoma ceylanicum
atgagggctgcttggatgcttctttctatgctgcatgctgggtacatgctgaatttcacaatggaggtgtatgattggggatcccttgctaaaaacttgatcgccaccggtaactacactgaattcctggagaaacaggataaaattcgctacagcgaccttgagtggaaatggcaagggctgaatgactacttcgatcagttttaccttggagttgttggtgttggaacaccccgccaaatcttctaccttcaaatggacactggctcttcaaacatgtgggtaatcgacgcggcatgtccacagcgccagtgcactggatatccagcaggctaccgaccaaaactaaaatttaaacccggcgcctccagaacgttcaagaaaatcccgcaaggatttcacatgaagtactataccggatcagcagatggttactatggcactgatactatcagcttcgcaggtttcaacgtcccgacccaaaaattcggcgtagccacatccatcgctgacgtgtttggctaccagccaatcgacggcattttcggtctcggatggccctcgctagctagaggaaatgttaaaacacctctggaagcaattctcccaaaactcgacaagaaacttttcactatttggctgggaagaaggacgacaatgtcatacggtgcaatggtcggatacatacaatacggggctttggacaccacacactgcatatcggccataaattgggtgcccctatcgcttgctaagtattggcagttcccaattcaaggcttccaaattgggcagtttgtttggaattcggttgatcaggtgatctccgattctgggacctcattcattggcactccgatggcagtattaaacggcatcctacgagcgaccaacgcaaagtacatgcctgcccataggatgtacgtcgtcccgtgcgcgaagatgtgggcgcaacccaatataatcttcagaatcagcggtcatcaatacgtcatcccatctcaccagtatgtaattgatatgaaacttggacatggctattgtgctctggcagtcttcggcattcaatcaggtggatttagcgcacaatggattctaggagatccatttattcgcacttactgcaacattcacgattttgagaacaagcgtatcggattttcactcgcaaaaaacatgtga

SEQ ID NO: 504 - DNA, 1398 bp, Ancylostoma ceylanicum
atgggaaatcgagctctcggttgtcatcgaatgcaagtccacgacggagttgaatacgaagtaaaagccacaatcctcgaacttgaaagccctgacgaaggtgaagccgccgaaacgttggccagtgaaaagatattagttgacacccttgttttcgttcttaaaggcgtatttcaagcaggtgtgccctctgactgtgccacgtctctgcaccagatgagggctgcttggatgcttctttctatgctgcatgctgggtacatgctgaatttcacaatggaggtgtatgattggggatcccttgctaaaaacttgatcgccaccggtaactacactgaattcctggagaaacaggataaaattcgctacagcgaccttgagtggaaatggcaagggctgaatgactacttcgatcagttttaccttggagttgttggtgttggaacaccccgccaaatcttctaccttcaaatggacactggctcttcaaacatgtgggtaatcgacgcggcatgtccacagcgccagtgcactggatatccagcaggctaccgaccaaaactaaaatttaaacccggcgcctccagaacgttcaagaaaatcccgcaaggatttcacatgaagtactataccggatcagcagatggttactatggcactgatactatcagcttcgcaggtttcaacgtcccgacccaaaaattcggcgtagccacatccatcgctgacgtgtttggctaccagccaatcgacggcattttcggtctcggatggccctcgctagctagaggaaatgttaaaacacctctggaagcaattctcccaaaactcgacaagaaacttttcactatttggctgggaagaaggacgacaatgtcatacggtgcaatggtcggatacatacaatacggggctttggacaccacacactgcatatcggccataaattgggtgcccctatcgcttgctaagtattggcagttcccaattcaaggcttccaaattgggcagtttgtttggaattcggttgatcaggtgatctccgattctgggacctcattcattggcactccgatggcagtattaaacggcatcctacgagcgaccaacgcaaagtacatgcctgcccataggatgtacgtcgtcccgtgcgcgaagatgtgggcgcaacccaatataatcttcagaatcagcggtcatcaatacgtcatcccatctcaccagtatgtaattgatatgaaacttggacatggctattgtgctctggcagtcttcggcattcaatcaggtggatttagcgcacaatggattctaggagatccatttattcgcacttactgcaacattcacgattttgagaacaagcgtatcggattttcactcgcaaaaaacatgtga

SEQ ID NO: 505 - DNA, 1368 bp, Ancylostoma ceylanicum
atgcaagtccacgacggagttgaatacgaagtaaaagccacaatcctcgaacttgaaagccctgacgaaggtgaagccgccgaaacgttggccagtgaaaagatattagttgacacccttgttttcgttcttaaaggcgtatttcaagcaggtgtgccctctgactgtgccacgtctctgcaccagatgagggctgcttggatgcttctttctatgctgcatgctgggtacatgctgaatttcacaatggaggtgtatgattggggatcccttgctaaaaacttgatcgccaccggtaactacactgaattcctggagaaacaggataaaattcgctacagcgaccttgagtggaaatggcaagggctgaatgactacttcgatcagttttaccttggagttgttggtgttggaacaccccgccaaatcttctaccttcaaatggacactggctcttcaaacatgtgggtaatcgacgcggcatgtccacagcgccagtgcactggatatccagcaggctaccgaccaaaactaaaatttaaacccggcgcctccagaacgttcaagaaaatcccgcaaggatttcacatgaagtactataccggatcagcagatggttactatggcactgatactatcagcttcgcaggtttcaacgtcccgacccaaaaattcggcgtagccacatccatcgctgacgtgtttggctaccagccaatcgacggcattttcggtctcggatggccctcgctagctagaggaaatgttaaaacacctctggaagcaattctcccaaaactcgacaagaaacttttcactatttggctgggaagaaggacgacaatgtcatacggtgcaatggtcggatacatacaatacggggctttggacaccacacactgcatatcggccataaattgggtgcccctatcgcttgctaagtattggcagttcccaattcaaggcttccaaattgggcagtttgtttggaattcggttgatcaggtgatctccgattctgggacctcattcattggcactccgatggcagtattaaacggcatcctacgagcgaccaacgcaaagtacatgcctgcccataggatgtacgtcgtcccgtgcgcgaagatgtgggcgcaacccaatataatcttcagaatcagcggtcatcaatacgtcatcccatctcaccagtatgtaattgatatgaaacttggacatggctattgtgctctggcagtcttcggcattcaatcaggtggatttagcgcacaatggattctaggagatccatttattcgcacttactgcaacattcacgattttgagaacaagcgtatcggattttcactcgcaaaaaacatgtga

SEQ ID NO: 506 - DNA, 1251 bp, Ancylostoma ceylanicum
atgaagaccgctttactgttcgtctctttgctggcagcggtgtactccaagacgatcacaatgcaaactcgcagaactggctcactccgagcgaaactgatcgcaacaaagcaactccgacagttcgtagaaaaacagcgtgcaaaacgtttcgagatccttaaacgcggatcggagcccttcagggacttctatgacgacttctacatcggagaagttgatctcggcactccaggccaacccactcttcttgtaatggacaccgggtcatcgaacttatgggcgatcgacagtggttgcgacctcgatgcatgcaatggctatccaattagtggatataccaggcacaaattcaataccaacgaatcgtctaccttccatgcggaagaagaagacttcgccatacagtatggctcgggtttctgctcgggatatctcgcaaccgataccatctcattcgcaggaataagcatctccaacctagaatttgggatcgcaacgtacctcgacgacgtctttgggtatcaacctatggatggaatattcgggcttggatggccatcaattgcagttgataacgtgacaacaccgatacaacgcatactttccgaattggatcagcccattttcacagtgtggctcgacagaaaggtgaacatcagcgaaggaggtgatgccggagtgatcactttcggtggttttgacgacgatcattgcgaatccaatgtcagctatgtgcctcttactgcagagacttactggcaattttctattgatggttactctatttgtacacataagtgtcacaaaaaagcacaggtaaacagtgaatatatttatggtgagaccgcaatatatttgcccagaaaaattcaggtgatttccgacaccggcacatcttggattggagctcctcagcacgtaatcgacaacgttgccgatgcaactaatgcagattacgatttcttccaggatatttacacagtaccctgcgccaacatggattctcttccaccctttaatatcaccatcggtggtagggaatactccattccttcttcagagtatgtactggatctgggcctcggcgatggtgattgcgttttgacgttcttctccatggatgattctaatggattcagcgatcctacgtggatactcggtgacacattcatccgaacattctgcaatgtctatgacgttggagcaaagcagattggctttgccaaagccaagcacggcaatatataa

SEQ ID NO: 507 - DNA, 1194 bp, Ancylostoma ceylanicum
atgaagaccgctttactgttcgtctctttgctggcagcggtgtactccaagacgatcacaatgcaaactcgcagaactggctcactccgagcgaaactgatcgcaacaaagcaactccgacagttcgtagaaaaacagcgtgcaaaacgtttcgagatccttaaacgcggatcggagcccttcagggacttctatgacgacttctacatcggagaagttgatctcggcactccaggccaacccactcttcttgtaatggacaccgggtcatcgaacttatgggcgatcgacagtggttgcgacctcgatgcatgcaatggctatccaattagtggatataccaggcacaaattcaataccaacgaatcgtctaccttccatgcggaagaagaagacttcgccatacagtatggctcgggtttctgctcgggatatctcgcaaccgataccatctcattcgcaggaataagcatctccaacctagaatttgggatcgcaacgtacctcgacgacgtctttgggtatcaacctatggatggaatattcgggcttggatggccatcaattgcagttgataacgtgacaacaccgatacaacgcatactttccgaattggatcagcccattttcacagtgtggctcgacagaaaggtgaacatcagcgaaggaggtgatgccggagtgatcactttcggtggttttgacgacgatcattgcgaatccaatgtcagctatgtgcctcttactgcagagacttactggcaattttctattgatggttactctatttgtacacataagtgtcacaaaaaagcacaggtgatttccgacaccggcacatcttggattggagctcctcagcacgtaatcgacaacgttgccgatgcaactaatgcagattacgatttcttccaggatatttacacagtaccctgcgccaacatggattctcttccaccctttaatatcaccatcggtggtagggaatactccattccttcttcagagtatgtactggatctgggcctcggcgatggtgattgcgttttgacgttcttctccatggatgattctaatggattcagcgatcctacgtggatactcggtgacacattcatccgaacattctgcaatgtctatgacgttggagcaaagcagattggctttgccaaagccaagcacggcaatatataa

SEQ ID NO: 508 - DNA, 1245 bp, Ancylostoma ceylanicum
atgaaacttcttctactatttgctgccctggtggcggtgctctacgccaagacgttccagatgaacgcccgttccgttggttcacttcgagcccggcttatcgcttctggccaatatcgccaatacctgaacctgcagcgcatgcgtcggatacaaattctacgcaaaggttcgcagccattcctggactacaccgatgacttctacgtcggaatagttgacgtaggaacgccagagcaaaacgtgactctggtactggacaccggttcgtcaaatctgtgggtgattgacgatgcatgccgaagtgaggcgtgcaatggttttcctcagagcggctacacaaagcataaattcaacacgaagatgtcgatgacattcaagaaggaagagcgtagtttttcgctcttctatggatccggctcttgcaatggatacctggccactgacgctgtttcattcgcaggcctcaaaattctaaaacaggagtttggcgttgccacaaccatagccgatgtgttcggatatcaaccagtcgatggaatccttggactaggatggccggatcttgctgtagaaaaggttgtcccacccatgcagaatatcctttccgagctggacaaacctatcttcacagtctggttagatcgaaaggtaaaaccaagcgcaggtggcactggagggctcatcacctatggtgactttgaccttaagaactgtgccaaagatgttacgtatgtcaagctgtcgtcgctaacctactggcagttcccaatccaaggcttttcagttggaaacttttcgcaaactgaaacggaacaggtcatctccgacaccggcacttcgtggattggcgcccccagcagtgtcgttgacgcagtcgcgcgggaaatcggtgccgagttcgattcgtacaatcagctgtacaccgtaccttgctccacaatgaaagagaagccggatctggtcttcaccatcgacggcgtcaagtacaatatcccctctgtggaatacatccttgatcttgaactaggaaatgacaaggttggtgaagagcatttggtaggaacttggtcattttttccaaattctgtgatttgcagtgtgctatcaccttctttggaatggattctggaggctttggcccatcatggatccttggtgacacgtggattcgtacttactgcaatatccatgatattggcgagaagagaattggttttgcgagggccattcatgaagagttga

SEQ ID NO: 509 - DNA, 1011 bp, Ancylostoma ceylanicum
atgtggattcttattgcccttgtggttaccacatttgccgagaaaccaatcacgatcgatgagtttctcgctaagcccataccggagtatgctaagcaccttaccggacaagcccttgtggactacgttaatgagcatcagccatttttcaaggcgcactatacaccaggagcagaagagctcggaagatctcgtataatggattcaaagtttttggtaggaccaaacaaagaggatttaatgacggatgtaatcactgacgagaagctccctgagagctacgacgcacgcgaacgatggccgcagtgcaaatcaattggcaccattcgtgatcagtctaaatgtggttcatgttgggcagtatcggcagcgggagccatgtcggaccaattatgcgtgcagtcaaacggtacgataaaggtgctcatttcggacgcggatctactcgcgtgctgcgacccatgtggatttggatgccagggtggtttcgctctgaaggcgtacgactacatgaagcatgaaggtgtttgtactgggggaagatacaagcagaaggatgtatgcatgccgtatccgtactttccatgtggaaaacacaaggaccagccttactattcagaatgccccccacattatttcccaacaccaaaatgtcgaaagaagtgccagcgtaaatacggaaagtcttactatgacgacaagtactttgcgaagacatcctacatgatctcaaaggatgaagagaaaatcaaacaagagatctacaagcatgggcctgtttctgcttcttttgaaatatacacggacttcttgaactacaaagaaggaatttatgtggtctgtcattatattcctgtccataacagctcccatcatactgctggtcaaaaggaagggtcacatgcgatcaaaatcattggctggggcagagcaaatgacacggattactggctgattgcaaactcctacaacaccgattggggagagaacggtatgtacatttcgcagtaa

SEQ ID NO: 510 - DNA, 4407 bp, Ancylostoma ceylanicum
atgcatttacagccacgtcccgtcaagacgttggcgtggttctacgagaaatgcgtagcagcacggatgaattgggctgacgcagtactgaatagtaatgtggtaatgaaagctgtgcaagatcttgcagcagggaacaaaaactaccccgaagaaactaagttcccgttctacatgcttttccaaaacgaaactgtaaagaactttcccacgcctcgtgggctctcttacctgttaggacatctcgccggagtgtacggagtaccaactattgtaccaatgagcgtcgacaccaattggaaggacccttacgggaaaaatggttattcactgttcatcgaccaacccggtacaatgctgcctcaaatcggtcactccagatcgtgggatattctgaaaccagggcttaccattcgacttacgttactcacttcgattctcggtgcattcaatgatatagaactcgatgatactatgcttaagaaggatgccgaagatgttgccgaattcgaccatcttctcgctatgaaatactgcagcgacgatctgagtcggaaggaactcgagcgagtttacaatcctatgacctttccacaaatgaagcaaagatatccaaacattgactgggtcatgcttctgacagagactacccaacttgcaccaaacgtcacccgaagaatactcgccgatcccaactatcagttcattgtaatggagccggagatgcttcaacgactgagcgatgccctcggagaatcgtcgaaatttgtttctccgcgcaccgtggtcaactacatctattcgcagttacttgcagcatacagcagttttctgccgatacccatgatggattccaacaaccccaacaacaacctgaccatcctcgaacacatacccacgaaaactcgtccaccaccgcccagaccccgatccatttggccagaaaggccaatatataaacagcagcagtacgatgacgagcaagcggctcagtttagctgtgctgcagaaagtattaatacactgaagtatgcgaatggacggatgttcatcgacaaaatttatccgacacaaaaatcccgtaaagaactgcgagagaacgttggaaagatgatttcaggaatcctagttggctttcgctctatgattgaccagctgaactggatgacgccggcttcaaaactaggtgcttacaagaaaatcgaccatcttgtgaagaacatcggctatccggactggatcactgacgatgagaaactgaccaaatcctatgagggtctcgatattcgaataggaaaggacgattatttcactattctgcagaaagtcatagcgtggaagatcggcgaccactggaatatgctttttgacaggtcacctgatcgtgaggatttctccgcccctcttgggagtgcgaacgcttggtatcagccgcagctcaactccatcactctccccgcctccatacttcattcaccattttaccacccggatctgcccactgctgtgaatttcggagcgatgggaatgattgttggtcacgagcttacccatggttttgacgacatgggcgtgcaatgggacggtcttggcgttctggatggctggatggactatccgtcagaagttggattccgccaaatggctgactgtgtcgtagaagagtatgggaggttctgcccattcaacaaaacagagcatggagatgttgcgtgcgtggacggggctgcgacacagggcgagaacattgccgacaatggaggtatccgagctgccttccgtgcttatcgcaaccacatcaaccttcacggtccggatccgcagcttccggatgagcaactgcaggagttcacctccgatcagctcttcttcatgagttttgctcagatttggtgccaagtaccagatgacgaagcgtctttgaggagccaacttatgttcgacgtccattcaccctcgatgtatcgcgtctggggtactatacagaacttccccgccttcaaagacgctttccactgtccgtcttctccctacgctcccgacaaacattgtgacgtatgggtctcggagccggattcatcccacggtgagcctgtggttaaaacggaactgaacgtaaggcaaaatgagccaatcagtccaaacaacttcgaggagtatagtgcctacaaagttgctgccgactactacaaggaatcggtaaacacctcggtggacccatgcacagactttttccaatacgcctgcggaaagtacgataagccggtgtcctttggcgttggcagagcaaaaatcgacgaaaacatcgccaaaaagctctacagtccggaatatgacgccactatcaaaagctccaaggccctcaccaaggggaaatccttcatagatgcttgcgtggagactgcgaaggattcctcgaagaaccaacaaatcctggccacagagaactatctcttgccacgtgttaataagctggctaattacctcggttctaacttcacctacgttttcggtggtgaagtgagccatcggccggacaagacgcaactggcgaacgctctaggttatctgtcgtttgatcagggcatcgacacgttcgtcacgccaatggtcgacacaaattggccgcagcccaaggagggctacacaatgtttctggaccagaacactgcattcatgagcaaatcctactacaaaccaagcgctttcacgacgatcaaaaagagctacgtgaattcagcgacaaaaataatcgccacttttgccaaagctcagaacttgcggatcgatgagacaaaactcaaggatgatatccgaggtctcatagaattcgaacaaatgattgccctctcatacagcactgacgacgacacccgccggacctattcgaggtcatggaatcctgtggacatcgaatggcttgcagaatacagttttgtggattggaaggtttacatgaaacaggtgccaaatgtagctcaagaagtggtgcaaatgcctacgttcatggtttcagtgtctgagccagagcagctcgagaaaatgaccagggactatggaacatgggatcaaacgaaattggtcaactatctgttcatgagacttgtgctgtccaacgctcaatacctgccttcctatgctagcggctttgacgaaatgcccgaagagccattagtattgggacgcagacgcccccatttccgcttcccgaagagcaacactgtcgaggatacacagctccactgcgtaggattagccaatcagcttatgccatatgccattggacgagtttacattgattatgaatatcccgacaacaataagaagcaattgattaggaaaacaacagggaacatgatgcaaaatatcatacattcgttccaaggaatgctggattcgctggattggatgacgcaaaagacgaagcggaaagctctagagaaaacactggacatagtacaaaacatcgccttccctgactggataatggacaaccagaagctggacgactattacaaagagattgatttcaacgtgactcaagagaactactacgatatgtggacgaagctcattgtattcaacattgccctcgtgtacaaacagctgacagctaaagaagctgaccgtcgtgattttctgggacagccagctacggtgaacgcatggtacatgcccgaactgaactccatcacgttccctgccggaatcctgcaaccaccatatttccatcccctttggccgacgtccgttaactatggaggattgggtgtagttgcaggacacgaactcatccacggcttcgacgatcaaggagttcaatggggtcctggcggggaaatgtcgctcccaagttgtggtgaatgcactggatggatggacaagaactccactgctggtttcaaagcgatggcggagtgtgtcatagatgaatacaacaagttctgtcctttggatcccagccaatttactccaaactgtgtaaatggagcgaatacacaaggagaaaacattgctgacaatggcggtgggaaaatttttcccacggataaatcgacccttcgatggcctgaaaatttttcaggaatccatactgcattccgagcctacagaactcacattgctctgaacgggccagatccactgcttcctgaccgtctattcggacaattcacacacgaccagctgttcttcctgagtttcgcacaggtatggtgtgaaaatcgacgctctgatgaccggctctaccagcagctgatggtcgatccgcattcgccagcgatgtaccgggtattcggcaccatccagaactatccggcattcagggaggcatacaactgtccgctggaaacccagtatgccccggaacagcactgcaatgtttgggtgcctaacaatacgtcataa

SEQ ID NO: 511 - DNA, 4671 bp, Ancylostoma ceylanicum
atgcatttacagccacgtcccgtcaagacgttggcgtggttctacgagaaatgcgtagcagcacggatgaattgggctgacgcagtactgaatagtaatgtggtaatgaaagctgtgcaagatcttgcagcagggaacaaaaactaccccgaagaaactaagttcccgttctacatgcttttccaaaacgaaactgtaaagaactttcccacgcctcgtgggctctcttacctgttaggacatctcgccggagtgtacggagtaccaactattgtaccaatgagcgtcgacaccaattggaaggacccttacgggaaaaatggttattcactgttcatcgaccaacccggtacaatgctgcctcaaatcggtcactccagatcgtgggatattctgaaaccagggcttaccattcgacttacgttactcacttcgattctcggtgcattcaatgatatagaactcgatgatactatgcttaagaaggatgccgaagatgttgccgaattcgaccatcttctcgctatgaaatactgcagcgacgatctgagtcggaaggaactcgagcgagtttacaatcctatgacctttccacaaatgaagcaaagatatccaaacattgactgggtcatgcttctgacagagactacccaacttgcaccaaacgtcacccgaagaatactcgccgatcccaactatcagttcattgtaatggagccggagatgcttcaacgactgagcgatgccctcggagaatcgtcgaaatttgtttctccgcgcaccgtggtcaactacatctattcgcagttacttgcagcatacagcagttttctgccgatacccatgatggattccaacaaccccaacaacaacctgaccatcctcgaacacatacccacgaaaactcgtccaccaccgcccagaccccgatccatttggccagaaaggccaatatataaacagcagcagtacgatgacgagcaagcggctcagtttagctgtgctgcagaaagtattaatacactgaagtatgcgaatggacggatgttcatcgacaaaatttatccgacacaaaaatcccgtaaagaactgcgagagaacgttggaaagatgatttcaggaatcctagttggctttcgctctatgattgaccagctgaactggatgacgccggcttcaaaactaggtgcttacaagaaaatcgaccatcttgtgaagaacatcggctatccggactggatcactgacgatgagaaactgaccaaatcctatgagggtctcgatattcgaataggaaaggacgattatttcactattctgcagaaagtcatagcgtggaagatcggcgaccactggaatatgctttttgacaggtcacctgatcgtgaggatttctccgcccctcttgggagtgcgaacgcttggtatcagccgcagctcaactccatcactctccccgcctccatacttcattcaccattttaccacccggatctgcccactgctgtgaatttcggagcgatgggaatgattgttggtcacgagcttacccatggttttgacgacatgggcgtgcaatgggacggtcttggcgttctggatggctggatggactatccgtcagaagttggattccgccaaatggctgactgtgtcgtagaagagtatgggaggttctgcccattcaacaaaacagagcatggagatgttgcgtgcgtggacggggctgcgacacagggcgagaacattgccgacaatggaggtatccgagctgccttccgtgcttatcgcaaccacatcaaccttcacggtccggatccgcagcttccggatgagcaactgcaggagttcacctccgatcagctcttcttcatgagttttgctcagatttggtgccaagtaccagatgacgaagcgtctttgaggagccaacttatgttcgacgtccattcaccctcgatgtatcgcgtctggggtactatacagaacttccccgccttcaaagacgctttccactgtccgtcttctccctacgctcccgacaaacattgtgacgtatgggtctcggagccggattcatcccacggtgagcctgtggttaaaacggaactgaacgtaaggcaaaatgagccaatcagtccaaacaacttcgaggagtatagtgcctacaaagttgctgccgactactacaaggaatcggtaaacacctcggtggacccatgcacagactttttccaatacgcctgcggaaagtacgataagccggtgtcctttggcgttggcagagcaaaaatcgacgaaaacatcgccaaaaagctctacagtccggaatatgacgccactatcaaaagctccaaggccctcaccaaggggaaatccttcatagatgcttgcgtggagactgcgaaggattcctcgaagaaccaacaaatcctggccacagagaactatctcttgccacgtgttaataagctggctaattacctcggttctaacttcacctacgttttcggtggtgaagtgagccatcggccggacaagacgcaactggcgaacgctctaggttatctgtcgtttgatcagggcatcgacacgttcgtcacgccaatggtcgacacaaattggccgcagcccaaggagggctacacaatgtttctggaccagaacactgcattcatgagcaaatcctactacaaaccaagcgctttcacgacgatcaaaaagagctacgtgaattcagcgacaaaaataatcgccacttttgccaaagctcagaacttgcggatcgatgagacaaaactcaaggatgatatccgaggtctcatagaattcgaacaaatgattgccctctcatacagcactgacgacgacacccgccggacctattcgaggtcatggaatcctgtggacatcgaatggcttgcagaatacagttttgtggattggaaggtttacatgaaacaggtgccaaatgtagctcaagaagtggtgcaaatgcctacgttcatggtttcagtgtctgagccagagcagctcgagaaaatgaccagggactatggaacatgggatcaaacgaaattggtcaactatctgttcatgagacttgtgctgtccaacgctcaatacctgccttcctatgctagcggctttgacgaaatgcccgaagagccattagtattgggacgcagacgcccccatttccgcttcccgaagagcaacactgtcgaggatacacagctccactgcgtaggattagccaatcagcttatgccatatgccattggacgagtttacattgattatgaatatcccgacaacaataagaagcaattgattaggaaaacaacagggaacatgatgcaaaatatcatacattcgttccaaggaatgctggattcgctggattggatgacgcaaaagacgaagcggaaagctctagagaaaacactggacatagtacaaaacatcgccttccctgactggataatggacaaccagaagctggacgactattacaaagagattgatttcaacgtgactcaagagaactactacgatatgtggacgaagctcattgtattcaacattgccctcgtgtacaaacagctgacagctaaagaagctgaccgtcgtgattttctgggacagccagctacggtgaacgcatggtacatgcccgaactgaactccatcacgttccctgccggaatcctgcaaccaccatatttccatcccctttggccgacgtccgttaactatggaggattgggtgtagttgcaggacacgaactcatccacggcttcgacgatcaaggagttcaatggggtcctggcggggaaatgtcgctcccaagttgtggtgaatgcactggatggatggacaagaactccactgctggtttcaaagcgatggcggagtgtgtcatagatgaatacaacaagttctgtcctttggatcccagccaatttactccaaactgtgtaaatggagcgaatacacaaggagaaaacattgctgacaatggcggtgggaaaatttttcccacggataaatcgacccttcgatggcctgaaaatttttcaggaatccatactgcattccgagcctacagaactcacattgctctgaacgggccagatccactgcttcctgaccgtctattcggacaattcacacacgaccagctgttcttcctgagtttcgcacaggtatggtgtgaaaatcgacgctctgatgaccggctctaccagcagctgatggtcgatccgcattcgccagcgatgtaccgggtattcggcaccatccagaactatccggcattcagggaggcatacaactgtccgctggaaacccagtatgccccggaacagcactgcaatgtttggatgactcgattattcttcctgctcagcggttgcatcgcttttgtggattccctgaataactttcttgtccaaggacgggcggacacgttgaaggtgcttcggaagattgttcgggaccgagatgcgaaggtggtgccatttgatccattcccaaacgcaaatgttgcctggcaggctacagtgcctaaggatcttcaaagcagaaagcttcacaaaagtttcagaggacaacagtccacgaaagtggcatccgcaggtcgagctgaaagtggtagatcgctgtaa

SEQ ID NO: 512 - DNA, 4614 bp, Ancylostoma ceylanicum
atgcatttacagccacgtcccgtcaagacgttggcgtggttctacgagaaatgcgtagcagcacggatgaattgggctgacgcagtactgaatagtaatgtggtaatgaaagctgtgcaagatcttgcagcagggaacaaaaactaccccgaagaaactaagttcccgttctacatgcttttccaaaacgaaactgtaaagaactttcccacgcctcgtgggctctcttacctgttaggacatctcgccggagtgtacggagtaccaactattgtaccaatgagcgtcgacaccaattggaaggacccttacgggaaaaatggttattcactgttcatcgaccaacccggtacaatgctgcctcaaatcggtcactccagatcgtgggatattctgaaaccagggcttaccattcgacttacgttactcacttcgattctcggtgcattcaatgatatagaactcgatgatactatgcttaagaaggatgccgaagatgttgccgaattcgaccatcttctcgctatgaaatactgcagcgacgatctgagtcggaaggaactcgagcgagtttacaatcctatgacctttccacaaatgaagcaaagatatccaaacattgactgggtcatgcttctgacagagactacccaacttgcaccaaacgtcacccgaagaatactcgccgatcccaactatcagttcattgtaatggagccggagatgcttcaacgactgagcgatgccctcggagaatcgtcgaaatttgtttctccgcgcaccgtggtcaactacatctattcgcagttacttgcagcatacagcagttttctgccgatacccatgatggattccaacaaccccaacaacaacctgaccatcctcgaacacatacccacgaaaactcgtccaccaccgcccagaccccgatccatttggccagaaaggccaatatataaacagcagcagtacgatgacgagcaagcggctcagtttagctgtgctgcagaaagtattaatacactgaagtatgcgaatggacggatgttcatcgacaaaatttatccgacacaaaaatcccgtaaagaactgcgagagaacgttggaaagatgatttcaggaatcctagttggctttcgctctatgattgaccagctgaactggatgacgccggcttcaaaactaggtgcttacaagaaaatcgaccatcttgtgaagaacatcggctatccggactggatcactgacgatgagaaactgaccaaatcctatgagggtctcgatattcgaataggaaaggacgattatttcactattctgcagaaagtcatagcgtggaagatcggcgaccactggaatatgctttttgacaggtcacctgatcgtgaggatttctccgcccctcttgggagtgcgaacgcttggtatcagccgcagctcaactccatcactctccccgcctccatacttcattcaccattttaccacccggatctgcccactgctgtgaatttcggagcgatgggaatgattgttggtcacgagcttacccatggttttgacgacatgggcgtgcaatgggacggtcttggcgttctggatggctggatggactatccgtcagaagttggattccgccaaatggctgactgtgtcgtagaagagtatgggaggttctgcccattcaacaaaacagagcatggagatgttgcgtgcgtggacggggctgcgacacagggcgagaacattgccgacaatggaggtatccgagctgccttccgtgcttatcgcaaccacatcaaccttcacggtccggatccgcagcttccggatgagcaactgcaggagttcacctccgatcagctcttcttcatgagttttgctcagatttggtgccaagtaccagatgacgaagcgtctttgaggagccaacttatgttcgacgtccattcaccctcgatgtatcgcgtctggggtactatacagaacttccccgccttcaaagacgctttccactgtccgtcttctccctacgctcccgacaaacattgtgacgtatgggtctcggagccggattcatcccacggtgagcctgtggttaaaacggaactgaacgtaaggcaaaatgagccaatcagtccaaacaacttcgaggagtatagtgcctacaaagttgctgccgactactacaaggaatcggtaaacacctcggtggacccatgcacagactttttccaatacgcctgcggaaagtacgataagccggtgtcctttggcgttggcagagcaaaaatcgacgaaaacatcgccaaaaagctctacagtccggaatatgacgccactatcaaaagctccaaggccctcaccaaggggaaatccttcatagatgcttgcgtggagactgcgaaggattcctcgaagaaccaacaaatcctggccacagagaactatctcttgccacgtgttaataagctggctaattacctcggttctaacttcacctacgttttcggtggtgaagtgagccatcggccggacaagacgcaactggcgaacgctctaggttatctgtcgtttgatcagggcatcgacacgttcgtcacgccaatggtcgacacaaattggccgcagcccaaggagggctacacaatgtttctggaccagaacactgcattcatgagcaaatcctactacaaaccaagcgctttcacgacgatcaaaaagagctacgtgaattcagcgacaaaaataatcgccacttttgccaaagctcagaacttgcggatcgatgagacaaaactcaaggatgatatccgaggtctcatagaattcgaacaaatgattgccctctcatacagcactgacgacgacacccgccggacctattcgaggtcatggaatcctgtggacatcgaatggcttgcagaatacagttttgtggattggaaggtttacatgaaacaggtgccaaatgtagctcaagaagtggtgcaaatgcctacgttcatggtttcagtgtctgagccagagcagctcgagaaaatgaccagggactatggaacatgggatcaaacgaaattggtcaactatctgttcatgagacttgtgctgtccaacgctcaatacctgccttcctatgctagcggctttgacgaaatgcccgaagagccattagtattgggacgcagacgcccccatttccgcttcccgaagagcaacactgtcgaggatacacagctccactgcgtaggattagccaatcagcttatgccatatgccattggacgagtttacattgattatgaatatcccgacaacaataagaagcaattgattaggaaaacaacagggaacatgatgcaaaatatcatacattcgttccaaggaatgctggattcgctggattggatgacgcaaaagacgaagcggaaagctctagagaaaacactggacatagtacaaaacatcgccttccctgactggataatggacaaccagaagctggacgactattacaaagagattgatttcaacgtgactcaagagaactactacgatatgtggacgaagctcattgtattcaacattgccctcgtgtacaaacagctgacagctaaagaagctgaccgtcgtgattttctgggacagccagctacggtgaacgcatggtacatgcccgaactgaactccatcacgttccctgccggaatcctgcaaccaccatatttccatcccctttggccgacgtccgttaactatggaggattgggtgtagttgcaggacacgaactcatccacggcttcgacgatcaaggagttcaatggggtcctggcggggaaatgtcgctcccaagttgtggtgaatgcactggatggatggacaagaactccactgctggtttcaaagcgatggcggagtgtgtcatagatgaatacaacaagttctgtcctttggatcccagccaatttactccaaactgtgtaaatggagcgaatacacaaggagaaaacattgctgacaatggcggaatccatactgcattccgagcctacagaactcacattgctctgaacgggccagatccactgcttcctgaccgtctattcggacaattcacacacgaccagctgttcttcctgagtttcgcacaggtatggtgtgaaaatcgacgctctgatgaccggctctaccagcagctgatggtcgatccgcattcgccagcgatgtaccgggtattcggcaccatccagaactatccggcattcagggaggcatacaactgtccgctggaaacccagtatgccccggaacagcactgcaatgtttggatgactcgattattcttcctgctcagcggttgcatcgcttttgtggattccctgaataactttcttgtccaaggacgggcggacacgttgaaggtgcttcggaagattgttcgggaccgagatgcgaaggtggtgccatttgatccattcccaaacgcaaatgttgcctggcaggctacagtgcctaaggatcttcaaagcagaaagcttcacaaaagtttcagaggacaacagtccacgaaagtggcatccgcaggtcgagctgaaagtggtagatcgctgtaa

SEQ ID NO: 513 - DNA, 444 bp, Ancylostoma ceylanicum
atgcgtgcgtttgaagcgcgcgtctatgtgatgaagattaggcctagtcgcgttgctgacgcagctcagacgcatgcgttcgcggcttcgcttcgacgatgtgatcgcgttttcatccgtgattaccgcaccctatcgaccaatgaggaagttgtagccgactggattgctgcaaacggtccagctacgtttggtatgaacgtgacgaaagctctgtacagttaccgcagcggtgtttttactccatcaaaagaagactgtgaggagcattccctgggatcgcatgcgctgacaatcgttggctatggtgcggaaggaggcaaacccttctggctggtgaagaattcatggggctcacgttggggtcagggtggatatttcaagttggcacggggagtgaatgcgtgtggtgcagcaaataacgttgtagctccgatattgtaa

SEQ ID NO: 514 - DNA, 516 bp, Ancylostoma ceylanicum
atgcgtgcgtttgaagcgcgcgtctatgtgatgaagattaggcctagtcgcgttgctgacgcagctcagacgcatgcgttcgcggcttcgcttcgacgatgtgatcgcgttttcatccgtgattaccgcaccctatcgaccaatgaggaagttgtagccgactggattgctgcaaacggtccagctacgtttggtatgaacgtgacgaaagctctgtacagttaccgcagcggtgtttttactccatcaaaagaagactgtgaggagcattccctgggatcgcatgcgctgacaatcgttggctatggtgcggaaggaggcaaacccttctggctggtgaagaattcatggggctcacgttggggtcagggtggatatttcaagttggcacggggatggatttgcaccaatgtgaacacctataagcaatgtttggaggacgtcaaggaatttgctagtaagaggacttcttgctggaagacatttgtacaggacgggcaagcccagccaacctaa

SEQ ID NO: 515 - DNA, 249 bp, Ancylostoma ceylanicum
atgagacgtagccatgtgaaaaacaaagagtacagagaaagaagcgcaaattttggacgaactattgagctgacggaccgctggctgcagatgcctggacatttgaacgatgttcagctgtttcacaattggatttgcaccaatgtgaacacctataagcaatgtttggaggacgtcaaggaatttgctagtaagaggacttcttgctggaagacatttgtacaggacgggcaagcccagccaacctaa

SEQ ID NO: 516 - DNA, 402 bp, Ancylostoma ceylanicum
atgtacgactgcacttcagcttgtcggcttcaccgtcgccggatacactcatttcattccattactttaacacattcgcgacaatgtgctcaaccggttgagcacgcatggtgcgacgtgtgggaccgcgtgctcaaccggttcgatagaaacgaagaactgtacttccttgactgcaatacgaaggagagtattgtgctttatattggaaaacacaactacaccatcgaagcgtccaactttatcttagatctcggcgaaaacagatgcattctcacaatgtctggatacagtacctggtttggaccacaatggattctcggtgatccgttcatcagacaatattgtaacatacacgatatgggtatgaaaaggatcggatttgctaaatcacgaaagtaa

SEQ ID NO: 517 - DNA, 468 bp, Ancylostoma ceylanicum
atgtacgactgcacttcagcttgtcggcttcaccgtcgccggatacactgtgaagactggatgggaagtcatctccgacacagggtcctcattcatatctgctccgtactacattcatttcattccattactttaacacattcgcgacaatgtgctcaaccggttgagcacgcatggtgcgacgtgtgggaccgcgtgctcaaccggttcgatagaaacgaagaactgtacttccttgactgcaatacgaaggagagtattgtgctttatattggaaaacacaactacaccatcgaagcgtccaactttatcttagatctcggcgaaaacagatgcattctcacaatgtctggatacagtacctggtttggaccacaatggattctcggtgatccgttcatcagacaatattgtaacatacacgatatgggtatgaaaaggatcggatttgctaaatcacgaaagtaa

SEQ ID NO: 518 - DNA, 228 bp, Ancylostoma ceylanicum
atgcggagaaaacgccaggcatataagggaggcaagtttatgtggaaagatggaatgaactataagtttgagactggcactagtgaacaagtgaaaaaggatttcgcgaatgcagcgaaggcgtggtcgcaagacacttgtgttgacataagattaaactcctctggcaagtgtaacctcactgttttgggcatttacactacatgcgtgcgcttgacgcacatatag

SEQ ID NO: 519 - DNA, 1083 bp, Ancylostoma ceylanicum
atgcggagaaaacgccaggcatataagggaggcaagtttatgtggaaagatggaatgaactataagtttgagactggcactagtgaacaagtgaaaaaggatttcgcgaatgcagcgaaggcgtggtcgcaagacacttgtgttgacataagattaaactcctctggcaagtggaacgagggactccatgtcacagctctatatgatgcctgcgcctctgatgttggcaaagtcgggggatggcagtatctgtaccttggaagatactgcgaaggtttcggtggaattgcccacgaactcggacacgccttggggctggtacacactatgagtagaagtgaccgcgacgactacatattagtagacctgataaatatgaagcctgaatatgcagaggaattcaaaaaacattcgccagtaaggagttatggaataggatatgaatacggaagtattatgcactatggtcagagaagcgtctttttgccgcaagcctatctaataataccatttgatagtaaatacaagaataccctcggatctcaaatgatatcgttcgctgatctaactttgatcaaccgtcactacaaatgtacagagaaatgcgattctaaaagctcagcagtttgtaagaatcgtggatacccccaccctcgtgattgttctagatgtctttgccctagtggttacggtggaaaggactgcagtgaaagaccttccgatggatgcggtcacgagctcgaggcaagcaaaacatggcagaacgtgagcattacaattcgaaacgatgacccaaaacaatatttagacggatacaagaaatgcatctactggataaagtcacccgaaggtaccagaatgaagattagactcgaaaccatccgattccaaagtactgctggatgttcaaatgacggcattgaaataaaagccaaaaaggacataactcttactggttataggttttgttatgaggaagacgaagacttggtgctatcccctcgcttcagcactgctccagtaattgtttacagtcgtgttaatatcactagtacagcaattatcagctaccgatacggttag

SEQ ID NO: 520 - DNA, 933 bp, Ancylostoma ceylanicum
atggtacggagtggccgagcagggaacgagggactccatgtcacagctctatatgatgcctgcgcctctgatgttggcaaagtcgggggatggcagtatctgtaccttggaagatactgcgaaggtttcggtggaattgcccacgaactcggacacgccttggggctggtacacactatgagtagaagtgaccgcgacgactacatattagtagacctgataaatatgaagcctgaatatgcagaggaattcaaaaaacattcgccagtaaggagttatggaataggatatgaatacggaagtattatgcactatggtcagagaagcgtctttttgccgcaagcctatctaataataccatttgatagtaaatacaagaataccctcggatctcaaatgatatcgttcgctgatctaactttgatcaaccgtcactacaaatgtacagagaaatgcgattctaaaagctcagcagtttgtaagaatcgtggatacccccaccctcgtgattgttctagatgtctttgccctagtggttacggtggaaaggactgcagtgaaagaccttccgatggatgcggtcacgagctcgaggcaagcaaaacatggcagaacgtgagcattacaattcgaaacgatgacccaaaacaatatttagacggatacaagaaatgcatctactggataaagtcacccgaaggtaccagaatgaagattagactcgaaaccatccgattccaaagtactgctggatgttcaaatgacggcattgaaataaaagccaaaaaggacataactcttactggttataggttttgttatgaggaagacgaagacttggtgctatcccctcgcttcagcactgctccagtaattgtttacagtcgtgttaatatcactagtacagcaattatcagctaccgatacggttag

SEQ ID NO: 521 - DNA, 1155 bp, Ancylostoma ceylanicum
atgaattgctctttcagaagagaacagcatgcccaactcggcaacaccaaaagtggtagctccattgcggggatgcggagaaaacgccaggcatataagggaggcaagtttatgtggaaagatggaatgaactataagtttgagactggcactagtgaacaagtgaaaaaggatttcgcgaatgcagcgaaggcgtggtcgcaagacacttgtgttgacataagattaaactcctctggcaagtggaacgagggactccatgtcacagctctatatgatgcctgcgcctctgatgttggcaaagtcgggggatggcagtatctgtaccttggaagatactgcgaaggtttcggtggaattgcccacgaactcggacacgccttggggctggtacacactatgagtagaagtgaccgcgacgactacatattagtagacctgataaatatgaagcctgaatatgcagaggaattcaaaaaacattcgccagtaaggagttatggaataggatatgaatacggaagtattatgcactatggtcagagaagcgtctttttgccgcaagcctatctaataataccatttgatagtaaatacaagaataccctcggatctcaaatgatatcgttcgctgatctaactttgatcaaccgtcactacaaatgtacagagaaatgcgattctaaaagctcagcagtttgtaagaatcgtggatacccccaccctcgtgattgttctagatgtctttgccctagtggttacggtggaaaggactgcagtgaaagaccttccgatggatgcggtcacgagctcgaggcaagcaaaacatggcagaacgtgagcattacaattcgaaacgatgacccaaaacaatatttagacggatacaagaaatgcatctactggataaagtcacccgaaggtaccagaatgaagattagactcgaaaccatccgattccaaagtactgctggatgttcaaatgacggcattgaaataaaagccaaaaaggacataactcttactggttataggttttgttatgaggaagacgaagacttggtgctatcccctcgcttcagcactgctccagtaattgtttacagtcgtgttaatatcactagtacagcaattatcagctaccgatacggttag

SEQ ID NO: 522 - DNA, 1071 bp, Ancylostoma ceylanicum
atggtacggagtggccgagcagggaacgagggactccatgtcacagctctatatgatgcctgcgcctctgatgttggcaaagtcgggggatggcagtatctgtaccttggaagatactgcgaaggtttcggtggaattgcccacgaactcggacacgccttggggctggtacacactatgagtagaagtgaccgcgacgactacatattagtagacctgataaatatgaagcctgaatatgcagaggaattcaaaaaacattcgccagtaaggagttatggaataggatatgaatacggaagtattatgcactatggtcagagaagcgtctttttgccgcaagcctatctaataataccatttgatagtaaatacaagaataccctcggatctcaaatgatatcgttcgctgatctaactttgatcaaccgtcactacaaatgtacagagaaatgcgattctaaaagctcagcagtttgtaagaatcgtggatacccccaccctcgtgattgttctagatgtctttgccctagtggttacggtggaaaggactgcagtgaaagaccttccgatggatgcggtcacgagctcgaggcaagcaaaacatggcagaacgtgagcattacaattcgaaacgatgacccaaaacaatatttagacggatacaagaaatgcatctactggataaagtcacccgaaggtaccagaatgaagattagactcgaaaccatccgattccaaagtactgctggatgttcaaatgacggcattgaaataaaagccaaaaaggacataactcttactggttataggttttgttatgaggaagacgaagacttggtgctatcccctcgcttcagcactgctccagtaattgtttacagtcgtgttaatatcactagtacagcaattatcagctaccgatacgttttatacctaaaacacagcagcgctgcgacacagatccgagtcaaatgtggatttggtagcagatgtcacaggctaccagtatacatgaaaaccatatcgggatatagccagcaaaaggaaagaaacgacgttaaacggtga

SEQ ID NO: 523 - DNA, 1293 bp, Ancylostoma ceylanicum
atgaattgctctttcagaagagaacagcatgcccaactcggcaacaccaaaagtggtagctccattgcggggatgcggagaaaacgccaggcatataagggaggcaagtttatgtggaaagatggaatgaactataagtttgagactggcactagtgaacaagtgaaaaaggatttcgcgaatgcagcgaaggcgtggtcgcaagacacttgtgttgacataagattaaactcctctggcaagtggaacgagggactccatgtcacagctctatatgatgcctgcgcctctgatgttggcaaagtcgggggatggcagtatctgtaccttggaagatactgcgaaggtttcggtggaattgcccacgaactcggacacgccttggggctggtacacactatgagtagaagtgaccgcgacgactacatattagtagacctgataaatatgaagcctgaatatgcagaggaattcaaaaaacattcgccagtaaggagttatggaataggatatgaatacggaagtattatgcactatggtcagagaagcgtctttttgccgcaagcctatctaataataccatttgatagtaaatacaagaataccctcggatctcaaatgatatcgttcgctgatctaactttgatcaaccgtcactacaaatgtacagagaaatgcgattctaaaagctcagcagtttgtaagaatcgtggatacccccaccctcgtgattgttctagatgtctttgccctagtggttacggtggaaaggactgcagtgaaagaccttccgatggatgcggtcacgagctcgaggcaagcaaaacatggcagaacgtgagcattacaattcgaaacgatgacccaaaacaatatttagacggatacaagaaatgcatctactggataaagtcacccgaaggtaccagaatgaagattagactcgaaaccatccgattccaaagtactgctggatgttcaaatgacggcattgaaataaaagccaaaaaggacataactcttactggttataggttttgttatgaggaagacgaagacttggtgctatcccctcgcttcagcactgctccagtaattgtttacagtcgtgttaatatcactagtacagcaattatcagctaccgatacgttttatacctaaaacacagcagcgctgcgacacagatccgagtcaaatgtggatttggtagcagatgtcacaggctaccagtatacatgaaaaccatatcgggatatagccagcaaaaggaaagaaacgacgttaaacggtga

SEQ ID NO: 524 - DNA, 504 bp, Ancylostoma ceylanicum
atgaaacgtctttgttcaggaaacccacgcgggagatgtagggaagctatacgaaggggacatccttctcacaccgtaataacagtgttgtaccctccacttttgttgttgattgctgcttgtatccagcgaacttctagggaacaagaagcggatttcaccaacgctgtaagaggtgaagctagtatagaaccacggcagaagcgtcatgcatatagaggcaaagattatcctacgaatacatggggcgaaaaagtttactatcaattcgatatacatgcaagtcaaaccctcaaagatgaatttaaacgagcagcgatggcatggcagcaggacacttgcattgactttgaagaagaaacacgtgagcataaccggagtattttcaaatggggaattcattatgaaccaaatggaggctcacgtttcacatatcgacatcccatagtcggattacgcctgcctgctaaactttgcagagatccttccccaaaatacatgtga

SEQ ID NO: 525 - DNA, 489 bp, Ancylostoma ceylanicum
atgaagtttttgctgacagtactactattcgtagagattgaagcacatgctctcacgaattccaatccggaaacccacgcgggagatgtagggaagctatacgaaggggacatccttctcacaccggaacaagaagcggatttcaccaacgctgtaagaggtgaagctagtatagaaccacggcagaagcgtcatgcatatagaggcaaagattatcctacgaatacatggggcgaaaaagtttactatcaattcgatatacatgcaagtcaaaccctcaaagatgaatttaaacgagcagcgatggcatggcagcaggacacttgcattgactttgaagaagaaacacgtgagcataaccggagtattttcaaatggggaattcattatgaaccaaatggaggctcacgtttcacatatcgacatcccatagtcggattacgcctgcctgctaaactttgcagagatccttccccaaaatacatgtga

SEQ ID NO: 526 - DNA, 780 bp, Ancylostoma ceylanicum
atgagtagaaacgatcgagatgaatatatcgtggtggacacgataaacaagccgaactatgctaatcagttcaagaaaaacggatcatttgaaagttatggattgggctacgattatggaagtataatgcattacctccgaagaagtggcttctccaaagatgactacgtaatgatcatacccgatagcaaatacattaacaccctaggatctgaaatgatatcattcatcgatctaactatgatcaataaacactacaattgtacagagaaatgcaaatctgaaagctcagatttgcaatgtcagcacggcggttatccacatccgcgaaattgttccatatgcctttgtcctactggctatggtggtgttcattgcaacgaacgaccctctgatggatgcggtaaagagctcgaagcaaagaatacatggcaagaggagacgattactattagcggggactcgaaagaacacctggatggctacaagaaatgcaactactggataaagtctcccaaagacactaaaatcaagattgaactcaaagaacttcgattcaacgccacagctggatgttcaaaaggtggcgtggaagtcaaaacaaagaaagaccaaaccctcactggctacaggttttgtgacgagcttgaagaagacctgccgctgagttccactttaaatcttgttccgttgatcatttacagtcgcccgcatagtgatagcagagctgtcgtcagatacagatatggtcagtccagtaattatcaatttcttcggtaa

SEQ ID NO: 527 - DNA, 765 bp, Ancylostoma ceylanicum
atgagtagaaacgatcgagatgaatatatcgtggtggacacgataaacaagccgaactatgctaatcagttcaagaaaaacggatcatttgaaagttatggattgggctacgattatggaagtataatgcattacctccgaagaagtggcttctccaaagatgactacgtaatgatcatacccgatagcaaatacattaacaccctaggatctgaaatgatatcattcatcgatctaactatgatcaataaacactacaattgtacagagaaatgcaaatctgaaagctcagatttgcaatgtcagcacggcggttatccacatccgcgaaattgttccatatgcctttgtcctactggctatggtggtgttcattgcaacgaacgaccctctgatggatgcggtaaagagctcgaagcaaagaatacatggcaagaggagacgattactattagcggggactcgaaagaacacctggatggctacaagaaatgcaactactggataaagtctcccaaagacactaaaatcaagattgaactcaaagaacttcgattcaacgccacagctggatgttcaaaaggtggcgtggaagtcaaaacaaagaaagaccaaaccctcactggctacaggttttgtgacgagcttgaagaagacctgccgctgagttccactttaaatcttgttccgttgatcatttacagtcgcccgcatagtgatagcagagctgtcgtcagatacagatatgtgaaacgatcacgatag

SEQ ID NO: 528 - DNA, 1623 bp, Ancylostoma ceylanicum
atgtacagcttttacgggttaattctgacctcactactgacagaagccgtgaatttctcgccggtgatatttggccgaccccgaggtggatttctgaaggcaccagattcaaacgggcctcaaacggagtccaagtatatggtctactccaacattacacaaaaggtggatcacttcagtaacagctcaacggctaaatggctacagcgctaccaatacaactcgaagttctacaacgcaagcacaggaatagtgttcctgatgattggtggagaaggtgctatttctcctccaggcgacaaatgggttcgggatgagagcatcacgatgatgcagtgggctaaagaattcggcgctgctgctttccaactcgagcatcgtttttacggacctaaggagaattcccccacaggaaaacaagacatcgggtctttgaatctcctttctatcgaccaagctcttgaggacatcaaggagttcatcaaccaaatgaatgccaagtattttgcgggaacaaaaacgcactgggtaacatttggtggttcgtaccctggttcactctcggctttcttccgcgagacttacccagagtacacaatcggggcaatgtcctcatcctccgctgtgcacgttttcgtcgattattacggttatctggtacacacggaagagaactaccgtgcggagagcaacgactgcgcagagtacattcgtacggcatttataaatatgcaaaagctggcatacagtggtcaaaacggcagagagcagcttcggagtattttcaacctttgcgagccattcgatgaatacaacgtggcaaaatcgatgcaattcttctactctaatgtgattggttactttcaaggcatcaaccagtactctggagacaacagaaatgaagcaactagaaacggattaggcataccgatggcttgtcaaatcatgagcaacgccacactaggtgacgagatgacgagggtgaagaaacttatggactggtatgtcacaatgaatggtggcacgttggactgttacccaaatagttacaaagagttcgtgagatactatagtgacatcagttacagtaatcaacttcttgatgacgtcgttgctacgcgatcatggatttggcagacatgtacggagctcggctacttccagactactgacggaggcaacaacggcattttcggcagcaccttaccagtagacttctactcagatcaatgcacggctctttttggccctgagtacaccttaacctcaacgtatcagaaggtagcagcagtgctacagaagtatggaggagctgacgcttataagggcacaaaggtctgttttccaaatggctcgattgatccatggaaatcacttggacttctcaattcaaaccctgccaatagagttaacgcatttctgattgacggaactgctcactgtgctgacatgtatcctgcttctacgaaagatcggaagtcattgaccgacactagggcacttctcaaatcgcagctcaacgactggattagcgaagcactcgtttcaggaggtagttcctcgaacgttggactcatcacactaatgtttgtcctcctctcttttatctacctgcgaatttga

SEQ ID NO: 529 - DNA, 1047 bp, Ancylostoma ceylanicum
atgtggcactttatcgctagaacggcacgcggtgtgttcgtccgtcggctagaggtgttgtctctcctggatgagttgaagatacgtatgcctctgacgacgacgttcagacgaaacttgtggctgcaatggcagctgataacggaggcacagatgagccatccagatgagataccagtttggacaagatgtcgaataaaatgcctagtttgacagaaggaactcactggccgagctcttgttgactatgtacgaacacatcaaagcttgtttgaggttgaggagtcgggaaagaacaatgaacgcatgaagtatttgatgcccgtggatttcgtgcctaagcctagagaggaggatcgcatcaaagtagtggtgaagcggaaacttccagagagtttcaatcctctcatcggcgacgactggaattattgcctaggcatagtaaagcacattcgagatcaatcacgatgcggatcttgctgggcagtttcggcggccgaggttatgtccgaccgactttgtgtgcagtccaagggaaaaataaagaacgtttgcaaaccatatgcgttctatccatgcggtaatcatacgaacgaaatctggtatggtaaatgtccgaactattcatggccaacgccgaaatgcagaaaaacgtgtaaatatggatataaaaagtcctacgagaaggacaagtattatgcaaagagtgcatacatacttccaaacgatgtagaggcgattaaacaggaaataatggacaacggaccagttcaagccgtttttgacgtttatgaggacttccgactttataagaaaggaatttacaagcatacgatgggaatgaagaccggcgcacatgctgtcaaaatcatcggctggggaactgaagaaatatataattcaactcatcatatcaaaacaccttattggttaatcgccaactcttggaacgtggactggggagagcaaggatacttccgcatggtccgtggtgagaacaattgcggcattgaagaaatgattactgccggtataatggccacgtga

SEQ ID NO: 530 - DNA, 912 bp, Ancylostoma ceylanicum
atgattcgcttttttctcgtgtgttctgccttttctgctccatttggccttgatcctatcagttttgcttacgcaggacagaaggaactcactggccgagctcttgttgactatgtacgaacacatcaaagcttgtttgaggttgaggagtcgggaaagaacaatgaacgcatgaagtatttgatgcccgtggatttcgtgcctaagcctagagaggaggatcgcatcaaagtagtggtgaagcggaaacttccagagagtttcaatcctctcatcggcgacgactggaattattgcctaggcatagtaaagcacattcgagatcaatcacgatgcggatcttgctgggcagtttcggcggccgaggttatgtccgaccgactttgtgtgcagtccaagggaaaaataaagaacgtttgcaaaccatatgcgttctatccatgcggtaatcatacgaacgaaatctggtatggtaaatgtccgaactattcatggccaacgccgaaatgcagaaaaacgtgtaaatatggatataaaaagtcctacgagaaggacaagtattatgcaaagagtgcatacatacttccaaacgatgtagaggcgattaaacaggaaataatggacaacggaccagttcaagccgtttttgacgtttatgaggacttccgactttataagaaaggaatttacaagcatacgatgggaatgaagaccggcgcacatgctgtcaaaatcatcggctggggaactgaagaaatatataattcaactcatcatatcaaaacaccttattggttaatcgccaactcttggaacgtggactggggagagcaaggatacttccgcatggtccgtggtgagaacaattgcggcattgaagaaatgattactgccggtataatggccacgtga

SEQ ID NO: 531 - DNA, 1185 bp, Ancylostoma ceylanicum
atgtggcactttatcgctagaacggcacgcggtgtgttcgtccgtcggctagaggtgttgtctctcctggatgagttgaagatacgtatgcctctgacgacgacgttcagacgaaacttgtggctgcaatggcagctgataacggaggcacagatgagccatccagatgagataccagtttggacaagatgtcgaataaaatgcctagtttgacagaaggaactcactggccgagctcttgttgactatgtacgaacacatcaaagcttgtttgaggttgaggagtcgggaaagaacaatgaacgcatgaagtatttgatgcccgtggatttcgtgcctaagcctagagaggaggatcgcatcaaagtagtggtgaagcggaaacttccagagagtttcaatcctctcatcggcgacgactggaattattgcctaggcatagtaaagcacattcgagatcaatcacgatgcggatcttgctgggcagtttcggcggccgaggttatgtccgaccgactttgtgtgcagtccaagggaaaaataaagcaccagctttccgacaccgatatcttggcttgttgtggagaatattgcggaaaaggatgtagaggaggatggccaattaaagcttgggagtgggtcaaggaaaatggcgtgtgcacaggaggacgatactcagcgaagaacgtttgcaaaccatatgcgttctatccatgcggtaatcatacgaacgaaatctggtatggtaaatgtccgaactattcatggccaacgccgaaatgcagaaaaacgtgtaaatatggatataaaaagtcctacgagaaggacaagtattatgcaaagagtgcatacatacttccaaacgatgtagaggcgattaaacaggaaataatggacaacggaccagttcaagccgtttttgacgtttatgaggacttccgactttataagaaaggaatttacaagcatacgatgggaatgaagaccggcgcacatgctgtcaaaatcatcggctggggaactgaagaaatatataattcaactcatcatatcaaaacaccttattggttaatcgccaactcttggaacgtggactggggagagcaaggatacttccgcatggtccgtggtgagaacaattgcggcattgaagaaatgattactgccggtataatggccacgtga

SEQ ID NO: 532 - DNA, 567 bp, Ancylostoma ceylanicum
atgatatacaggtgcgacggtggttttcccattgaagcatggcgttacattgtcaagaaaggtgtctgcactggaggcccatatggtcaaaaggatgtgtgcaaggcatacgctttccatccctgcggtcgccataagaaccagaagtattacggagaatgcccggaagagtatcccacaccaaaatgcaggaaatcgtgccgcaaaggttacaagacgaagtacgcagacgacaaggttttcggaaagaatgcatatgctgtgaaaaagagcgtggaagccatccaaaaagaaattatggcaaatggaccggtccaagccgctatcaacacctatgaagatttctcacactacaagaagggtatatatgtgcacactgccggtaaagacacaggtggccacgctatcaagataatcggatggggtgtcgagaaaaaagtaccatactggattgttgccaactcttggaataatgactggggagaggatggacatttccgaatccttcgtggaagcaacgagtgcggtatcgaagaggaagtcgttgctggtatgctgaagctttag

SEQ ID NO: 533 - DNA, 4616 bp, Ancylostoma ceylanicum
gtagtgagttgaatgtgcagcctccaaagcaaatagaatctggcaacgagaaatactccggatataagagcgttgctgaccttttcagagcatccttgaacataaaggttaatccatgtgaggacttctacaattacacctgcggaaacttcaaaggagatatgggattcgttaatccatgtgaggacttctacaattacacctgcggaaacttcaaaggagatatgggattcgtagaatctgaagtggacaatataaagaaaatggctgagcaattaaataacgcgagttacataaagagcgcgcccgaaccagtcaagaccctggcagcgttctacgagaagtgcgtagcggcaagaatgaactgggacaatgtagtgaaagatgctaacattattatgaaagttatcaggcagttcgcagaaggtaacaaggactacccggatgagactcgattccccttttacatgttgtaccagaacgaaccagtcaaggagttccccactgctaggggtcttgcatacctgctggctaacccggctggtttgcatggtgccgctactctggtggcgccgttcgtggataccaactggaaggatcctcatggtaaaaatggctattcgttcttcatcgaccagccagtgacaatggtcccatacagcagccatgtgaaaacgtgggatgtaacaaagcagggactcgccaaaagtatagcgaccatgatgtttgttctggcgaattcccaaaacatcaatccaaatccggaacagttagcaaaagatgcacaggacattgttgaattcgatcatgttcttgccatgaaatacagcaccgacgacacgacaagacgaagcttcgagcgaaatttcaatccgatgacaattcgacaacttatgaacagctatccaaagatctcctggcctatgttcattgcggaggccagccagctcgccccacatgtgaccaaacgattgctagagaatccaaaatatcaatacatcgttatggagccagagaagctccagcagctcagcgatgatcttggaaatcccgactttgtgtcaactcgtactctggtcaactacatctacttttccttgttcagacagtacaggagtttcttaccctggccgtcagtagttgacttccataaattccgttccgaaactccacccctcaccagacaacgacccataagaaaagtggaatggcgctacaaacgacagcagtacgactcgaaacaggcggctcagttcagttgtgctgcagagaccgtggagcagctaccgtatgcaaacgctcgcatgtttgtcgacaaggtttatgcaacggaacaatcacgaaagaagttacgagaagacgttggagaaatggtttccggcatattagtgggattccgctccatgattgatcagctgaactggatgacacccgcttcaaagctaggcgcgtataagaaaatcgaccaccttgtgaagaatattggctatcccgactggatcaccgacaatgagaagctgatcgaatctcacaaggggctcaacatcgatgtaaacagtgatgattacttcgcaatgttgagaaagattcgggaatggatgatagttggtttctggaactcgcttttcggccggccagcgggtcgcgaggatttcaatgcgcctcctggaatgacgaatgcttggtaccagccacaactcaactccatcacccttcctgtagccattcttcaccaacccttctacgacccaaccctacctactgctgtcaactatggagcgctgggagtaattgttgggcacgaactcactcatggcttcgacgaccaaggcgtgcaatgggacggtactggcgtcctcagcaattggatggacaactcgtccaccattggcttccgcgatatggccgactgcgtcgtgaaacagtacggcaatttctgcccgctagacaaaggaaaatacggaccagccgcgtgcttggacggtgacatgacccaaggcgagaacattgccgacaatggaggtattcgatcagctttccgtgcttatcgcaattacataaacctccacggtccggatccacagcttccagatgatctgttgcaggatttcacctctgatcagctattcttcttgagttttgctcagacctggtgtgaagtaggtcgcggtgaagctgcaatgttaagtcagctgctgagagacgttcattcgccatccaaataccgtgtctggggtacgatgcagaacttcccagccttcaaagacgcgttccactgcccgtccacgtcctacgcgcccgacaagcactgcaacgtttgggtgtcagagttggattcatcttacggtgagccagtggtaaagactgagctgaacataaggccaaataagcaaattactcccaatgaaaaggaagagtatgaagcctacaagaccgcagccgatttcttccaggcaaccgtcaatacttcagcagatccgtgcacagactttttccagtacgcttgcggtaaacacaataagccggtatcatttggtgttgctagagataaggtcaaccagcacatagccgatcaactctacagcgagcactatgacgctactatcaagagctcaactgccctcagcaaagccaaggtgttcacagacgcttgcgttgatgccacgaaggactcgtccaagaatcaggagatccttgccaccaagaactatctcttgccacgggtcaataaactagctgaataccttggctcaaagttcacgtacgtgtttggtggagaagtgagccggatgccagacaaaacacaactggccaacgcgctgggttatttatccttcgatcagggcatcgacacgcttatcacgccgatggtcgacacaaactggccggagcccaaaaaaggctactcaatgttccttgaccaaaactctgcgtacatgggcaaaacctactatgaaccgaacgccttcaaaaccatcaaggaaaactacgtcaattccgcaacgaaaatcatcgccacgttcgcaaaggctcaggatctgagtatcaacgagggggagctgaaggaaaacatccgaggtctaattgaattcgagcagttcattgcactcacatacagcagtgctgatgagcttcgtcgcacgttccagagatcgtggaatcttatgagtgttgatgatctcgggaagttcagctttgtggactggaaagcttacatgaagcaggtaccaaaagtcgcacaggaagtcgttcagaagagtacattcagagtctcagtgtacgagaaagagcagtacgagaaaatgtcagcggattattcgtctggtaaatgggataaaacgaagctggtcaactacctcttcatgcgattggtgcttcagaatgcacagtacctaccttcttatgctagcggttttgatgaaatgcctgaggaaccaatagtcctcggaagacgacgtccatatttccgcttcagaagaaatgataaccttgaagacgttgtagtcaactgcgcttctatggcaaataatctcatgcagtatgcaatcggacgagtgtacatcgactatgaatatcccaatgaggagaagaagaaattgatcagagaaacagccggaggcatgatgcagaatgtcatacattcgttccaaggaatgcttgattcactggactggatgacacaagagacgaaagtgaaagcctatgagaaaacaatggacatagtacaaaacatcgctttccccgactggatcatggataaccaaaagatcgacagctactatcaaggcttgtacttcaactcggctcaagagaactactatgacatgtggaccaagctaatagtattcaacattgaaattatctaccgacagcttacagcaaaggaggctgatcgacgtgatttcctcgcccaacctgcgacagtcaacgcttggtacatgcccgaactgaactccatcacatttcctgccggaatcctgcaaccgccatacttccaccctctttggcctacgtcagtaaagtacggaggactgggcgtgattgcaggacacgaactaattcacggtttcgacgatcaaggcgttcagtggggtcccagcggtgaaatgtcattccgcagttgccctgaatgcactggatggatggacaagaactctacagctggcttcaatgcgatggcgcaatgtgtcataaacgagtacggccagttttgtcctttggatcccagcaaattcactccaaactgtgtcaacggtgcactcactcaaggcgagaatattgctgacaatggaggaatccacgctgcattccgtgcctaccgaactcacattggcctgaacggccaggatcctcagcttcctgatcgtctgtttggacagttcaaccatgatcagctgttcttcttgagtttcgcccaggtatggtgtgaaaagcgacgccctgacgaccgactctaccaacagctgatggtcgacccgcattcaccggcgatgtaccgagtgttcggtactctgcagaactatccagcattcagggtggcctacaactgtccagccgagtctcgatatgcaccaaagaagcactgcaatgtttgggtgcctaattataccccctaa

SEQ ID NO: 534 - DNA, 4649 bp, Ancylostoma ceylanicum
  modified_base (186)..(186): a, c, t, g, unknown or other
gtagtgagttgaatgtgcagcctccaaagcaaatagaatctggcaacgagaaatactccggatataagagcgttgctgaccttttcagagcatccttgaacataaaggttaatccatgtgaggacttctacaattacacctgcggaaacttcaaaggagatatgggattcgtagaatctgaagtgnattttagcttaccatttgttaatccatgtgaggacttctacaattacacctgcggaaacttcaaaggagatatgggattcgtagaatctgaagtggacaatataaagaaaatggctgagcaattaaataacgcgagttacataaagagcgcgcccgaaccagtcaagaccctggcagcgttctacgagaagtgcgtagcggcaagaatgaactgggacaatgtagtgaaagatgctaacattattatgaaagttatcaggcagttcgcagaaggtaacaaggactacccggatgagactcgattccccttttacatgttgtaccagaacgaaccagtcaaggagttccccactgctaggggtcttgcatacctgctggctaacccggctggtttgcatggtgccgctactctggtggcgccgttcgtggataccaactggaaggatcctcatggtaaaaatggctattcgttcttcatcgaccagccagtgacaatggtcccatacagcagccatgtgaaaacgtgggatgtaacaaagcagggactcgccaaaagtatagcgaccatgatgtttgttctggcgaattcccaaaacatcaatccaaatccggaacagttagcaaaagatgcacaggacattgttgaattcgatcatgttcttgccatgaaatacagcaccgacgacacgacaagacgaagcttcgagcgaaatttcaatccgatgacaattcgacaacttatgaacagctatccaaagatctcctggcctatgttcattgcggaggccagccagctcgccccacatgtgaccaaacgattgctagagaatccaaaatatcaatacatcgttatggagccagagaagctccagcagctcagcgatgatcttggaaatcccgactttgtgtcaactcgtactctggtcaactacatctacttttccttgttcagacagtacaggagtttcttaccctggccgtcagtagttgacttccataaattccgttccgaaactccacccctcaccagacaacgacccataagaaaagtggaatggcgctacaaacgacagcagtacgactcgaaacaggcggctcagttcagttgtgctgcagagaccgtggagcagctaccgtatgcaaacgctcgcatgtttgtcgacaaggtttatgcaacggaacaatcacgaaagaagttacgagaagacgttggagaaatggtttccggcatattagtgggattccgctccatgattgatcagctgaactggatgacacccgcttcaaagctaggcgcgtataagaaaatcgaccaccttgtgaagaatattggctatcccgactggatcaccgacaatgagaagctgatcgaatctcacaaggggctcaacatcgatgtaaacagtgatgattacttcgcaatgttgagaaagattcgggaatggatgatagttggtttctggaactcgcttttcggccggccagcgggtcgcgaggatttcaatgcgcctcctggaatgacgaatgcttggtaccagccacaactcaactccatcacccttcctgtagccattcttcaccaacccttctacgacccaaccctacctactgctgtcaactatggagcgctgggagtaattgttgggcacgaactcactcatggcttcgacgaccaaggcgtgcaatgggacggtactggcgtcctcagcaattggatggacaactcgtccaccattggcttccgcgatatggccgactgcgtcgtgaaacagtacggcaatttctgcccgctagacaaaggaaaatacggaccagccgcgtgcttggacggtgacatgacccaaggcgagaacattgccgacaatggaggtattcgatcagctttccgtgcttatcgcaattacataaacctccacggtccggatccacagcttccagatgatctgttgcaggatttcacctctgatcagctattcttcttgagttttgctcagacctggtgtgaagtaggtcgcggtgaagctgcaatgttaagtcagctgctgagagacgttcattcgccatccaaataccgtgtctggggtacgatgcagaacttcccagccttcaaagacgcgttccactgcccgtccacgtcctacgcgcccgacaagcactgcaacgtttgggtgtcagagttggattcatcttacggtgagccagtggtaaagactgagctgaacataaggccaaataagcaaattactcccaatgaaaaggaagagtatgaagcctacaagaccgcagccgatttcttccaggcaaccgtcaatacttcagcagatccgtgcacagactttttccagtacgcttgcggtaaacacaataagccggtatcatttggtgttgctagagataaggtcaaccagcacatagccgatcaactctacagcgagcactatgacgctactatcaagagctcaactgccctcagcaaagccaaggtgttcacagacgcttgcgttgatgccacgaaggactcgtccaagaatcaggagatccttgccaccaagaactatctcttgccacgggtcaataaactagctgaataccttggctcaaagttcacgtacgtgtttggtggagaagtgagccggatgccagacaaaacacaactggccaacgcgctgggttatttatccttcgatcagggcatcgacacgcttatcacgccgatggtcgacacaaactggccggagcccaaaaaaggctactcaatgttccttgaccaaaactctgcgtacatgggcaaaacctactatgaaccgaacgccttcaaaaccatcaaggaaaactacgtcaattccgcaacgaaaatcatcgccacgttcgcaaaggctcaggatctgagtatcaacgagggggagctgaaggaaaacatccgaggtctaattgaattcgagcagttcattgcactcacatacagcagtgctgatgagcttcgtcgcacgttccagagatcgtggaatcttatgagtgttgatgatctcgggaagttcagctttgtggactggaaagcttacatgaagcaggtaccaaaagtcgcacaggaagtcgttcagaagagtacattcagagtctcagtgtacgagaaagagcagtacgagaaaatgtcagcggattattcgtctggtaaatgggataaaacgaagctggtcaactacctcttcatgcgattggtgcttcagaatgcacagtacctaccttcttatgctagcggttttgatgaaatgcctgaggaaccaatagtcctcggaagacgacgtccatatttccgcttcagaagaaatgataaccttgaagacgttgtagtcaactgcgcttctatggcaaataatctcatgcagtatgcaatcggacgagtgtacatcgactatgaatatcccaatgaggagaagaagaaattgatcagagaaacagccggaggcatgatgcagaatgtcatacattcgttccaaggaatgcttgattcactggactggatgacacaagagacgaaagtgaaagcctatgagaaaacaatggacatagtacaaaacatcgctttccccgactggatcatggataaccaaaagatcgacagctactatcaaggcttgtacttcaactcggctcaagagaactactatgacatgtggaccaagctaatagtattcaacattgaaattatctaccgacagcttacagcaaaggaggctgatcgacgtgatttcctcgcccaacctgcgacagtcaacgcttggtacatgcccgaactgaactccatcacatttcctgccggaatcctgcaaccgccatacttccaccctctttggcctacgtcagtaaagtacggaggactgggcgtgattgcaggacacgaactaattcacggtttcgacgatcaaggcgttcagtggggtcccagcggtgaaatgtcattccgcagttgccctgaatgcactggatggatggacaagaactctacagctggcttcaatgcgatggcgcaatgtgtcataaacgagtacggccagttttgtcctttggatcccagcaaattcactccaaactgtgtcaacggtgcactcactcaaggcgagaatattgctgacaatggaggaatccacgctgcattccgtgcctaccgaactcacattggcctgaacggccaggatcctcagcttcctgatcgtctgtttggacagttcaaccatgatcagctgttcttcttgagtttcgcccaggtatggtgtgaaaagcgacgccctgacgaccgactctaccaacagctgatggtcgacccgcattcaccggcgatgtaccgagtgttcggtactctgcagaactatccagcattcagggtggcctacaactgtccagccgagtctcgatatgcaccaaagaagcactgcaatgtttgggtgcctaattataccccctaa

SEQ ID NO: 535 - DNA, 4958 bp, Ancylostoma ceylanicum
  modified_base (186)..(186): a, c, t, g, unknown or other
gtagtgagttgaatgtgcagcctccaaagcaaatagaatctggcaacgagaaatactccggatataagagcgttgctgaccttttcagagcatccttgaacataaaggttaatccatgtgaggacttctacaattacacctgcggaaacttcaaaggagatatgggattcgtagaatctgaagtgnattttagcttaccatttgttaatccatgtgaggacttctacaattacacctgcggaaacttcaaaggagatatgggattcgtagaatctgaagtggacaatataaagaaaatggctgagcaattaaataacgcgagttacataaagagcgcgcccgaaccagtcaagaccctggcagcgttctacgagaagtgcgtagcggcaagaatgaactgggacaatgtagtgaaagatgctaacattattatgaaagttatcaggcagttcgcagaaggtaacaaggactacccggatgagactcgattccccttttacatgttgtaccagaacgaaccagtcaaggagttccccactgctaggggtcttgcatacctgctggctaacccggctggtttgcatggtgccgctactctggtggcgccgttcgtggataccaactggaaggatcctcatggtaaaaatggctattcgttcttcatcgaccagccagtgacaatggtcccatacagcagccatgtgaaaacgtgggatgtaacaaagcagggactcgccaaaagtatagcgaccatgatgtttgttctggcgaattcccaaaacatcaatccaaatccggaacagttagcaaaagatgcacaggacattgttgaattcgatcatgttcttgccatgaaatacagcaccgacgacacgacaagacgaagcttcgagcgaaatttcaatccgatgacaattcgacaacttatgaacagctatccaaagatctcctggcctatgttcattgcggaggccagccagctcgccccacatgtgaccaaacgattgctagagaatccaaaatatcaatacatcgttatggagccagagaagctccagcagctcagcgatgatcttggaaatcccgactttgtgtcaactcgtactctggtcaactacatctacttttccttgttcagacagtacaggagtttcttaccctggccgtcagtagttgacttccataaattccgttccgaaactccacccctcaccagacaacgacccataagaaaagtggaatggcgctacaaacgacagcagtacgactcgaaacaggcggctcagttcagttgtgctgcagagaccgtggagcagctaccgtatgcaaacgctcgcatgtttgtcgacaaggtttatgcaacggaacaatcacgaaagaagttacgagaagacgttggagaaatggtttccggcatattagtgggattccgctccatgattgatcagctgaactggatgacacccgcttcaaagctaggcgcgtataagaaaatcgaccaccttgtgaagaatattggctatcccgactggatcaccgacaatgagaagctgatcgaatctcacaaggggctcaacatcgatgtaaacagtgatgattacttcgcaatgttgagaaagattcgggaatggatgatagttggtttctggaactcgcttttcggccggccagcgggtcgcgaggatttcaatgcgcctcctggaatgacgaatgcttggtaccagccacaactcaactccatcacccttcctgtagccattcttcaccaacccttctacgacccaaccctacctactgctgtcaactatggagcgctgggagtaattgttgggcacgaactcactcatggcttcgacgaccaaggcgtgcaatgggacggtactggcgtcctcagcaattggatggacaactcgtccaccattggcttccgcgatatggccgactgcgtcgtgaaacagtacggcaatttctgcccgctagacaaaggaaaatacggaccagccgcgtgcttggacggtgacatgacccaaggcgagaacattgccgacaatggaggtattcgatcagctttccgtgcttatcgcaattacataaacctccacggtccggatccacagcttccagatgatctgttgcaggatttcacctctgatcagctattcttcttgagttttgctcagacctggtgtgaagtaggtcgcggtgaagctgcaatgttaagtcagctgctgagagacgttcattcgccatccaaataccgtgtctggggtacgatgcagaacttcccagccttcaaagacgcgttccactgcccgtccacgtcctacgcgcccgacaagcactgcaacgtttgggtgtcagagttggattcatcttacggtgagccagtggtaaagactgagctgaacataaggccaaataagcaaattactcccaatgaaaaggaagagtatgaagcctacaagaccgcagccgatttcttccaggcaaccgtcaatacttcagcagatccgtgcacagactttttccagtacgcttgcggtaaacacaataagccggtatcatttggtgttgctagagataaggtcaaccagcacatagccgatcaactctacagcgagcactatgacgctactatcaagagctcaactgccctcagcaaagccaaggtgttcacagacgcttgcgttgatgccacgaaggactcgtccaagaatcaggagatccttgccaccaagaactatctcttgccacgggtcaataaactagctgaataccttggctcaaagttcacgtacgtgtttggtggagaagtgagccggatgccagacaaaacacaactggccaacgcgctgggttatttatccttcgatcagggcatcgacacgcttatcacgccgatggtcgacacaaactggccggagcccaaaaaaggctactcaatgttccttgaccaaaactctgcgtacatgggcaaaacctactatgaaccgaacgccttcaaaaccatcaaggaaaactacgtcaattccgcaacgaaaatcatcgccacgttcgcaaaggctcaggatctgagtatcaacgagggggagctgaaggaaaacatccgaggtctaattgaattcgagcagttcattgcactcacatacagcagtgctgatgagcttcgtcgcacgttccagagatcgtggaatcttatgagtgttgatgatctcgggaagttcagctttgtggactggaaagcttacatgaagcaggtaccaaaagtcgcacaggaagtcgttcagaagagtacattcagagtctcagtgtacgagaaagagcagtacgagaaaatgtcagcggattattcgtctggtaaatgggataaaacgaagctggtcaactacctcttcatgcgattggtgcttcagaatgcacagtacctaccttcttatgctagcggttttgatgaaatgcctgaggaaccaatagtcctcggaagacgacgtccatatttccgcttcagaagaaatgataaccttgaagacgttgtagtcaactgcgcttctatggcaaataatctcatgcagtatgcaatcggacgagtgtacatcgactatgaatatcccaatgaggagaagaagaaattgatcagagaaacagccggaggcatgatgcagaatgtcatacattcgttccaaggaatgcttgattcactggactggatgacacaagagacgaaagtgaaagcctatgagaaaacaatggacatagtacaaaacatcgctttccccgactggatcatggataaccaaaagatcgacagctactatcaaggcttgtacttcaactcggctcaagagaactactatgacatgtggaccaagctaatagtattcaacattgaaattatctaccgacagcttacagcaaaggaggctgatcgacgtgatttcctcgcccaacctgcgacagtcaacgcttggtacatgcccgaactgaactccatcacatttcctgccggaatcctgcaaccgccatacttccaccctctttggcctacgtcagtaaagtacggaggactgggcgtgattgcaggacacgaactaattcacggtttcgacgatcaaggcgttcagtggggtcccagcggtgaaatgtcattccgcagttgccctgaatgcactggatggatggacaagaactctacagctggcttcaatgcgatggcgcaatgtgtcataaacgagtacggccagttttgtcctttggatcccagcaaattcactccaaactgtgtcaacggtgcactcactcaaggcgagaatattgctgacaatggaggaatccacgctgcattccgtgcctaccgaactcacattggcctgaacggccaggatcctcagcttcctgatcgtctgtttggacagttcaaccatgatcagctgttcttcttgagtttcgcccaggtatggtgtgaaaagcgacgccctgacgaccgactctaccaacagctgatggtcgacccgcattcaccggcgatgtaccgagtgttcggtactctgcagaactatccagcattcagggtggcctacaactgtccagccgagtctcgatatgcaccaaagaagcactgcaatgtttggaatcttgcgcttctcgtaagcggtcgtgtctctcgcctatgctcacccaaccacaccgaggaggaagatgcccgtttcaacacgctgttggctggcgttgaccgtatgccaggaagaacggatcggctgcacctgtacatgaaaaatgtccatccaatcgctaccggaattcgactggcggataaggagacagtaaggcccaaggacgtgcccggaagatggacaaagctgttcattggtgccgattcttcaagaatccttgctatatcaatggtgtatttgacattttggtatattctgtctacagactctcctctcactgaaacatga

SEQ ID NO: 536 - DNA, 4925 bp, Ancylostoma ceylanicum
gtagtgagttgaatgtgcagcctccaaagcaaatagaatctggcaacgagaaatactccggatataagagcgttgctgaccttttcagagcatccttgaacataaaggttaatccatgtgaggacttctacaattacacctgcggaaacttcaaaggagatatgggattcgttaatccatgtgaggacttctacaattacacctgcggaaacttcaaaggagatatgggattcgtagaatctgaagtggacaatataaagaaaatggctgagcaattaaataacgcgagttacataaagagcgcgcccgaaccagtcaagaccctggcagcgttctacgagaagtgcgtagcggcaagaatgaactgggacaatgtagtgaaagatgctaacattattatgaaagttatcaggcagttcgcagaaggtaacaaggactacccggatgagactcgattccccttttacatgttgtaccagaacgaaccagtcaaggagttccccactgctaggggtcttgcatacctgctggctaacccggctggtttgcatggtgccgctactctggtggcgccgttcgtggataccaactggaaggatcctcatggtaaaaatggctattcgttcttcatcgaccagccagtgacaatggtcccatacagcagccatgtgaaaacgtgggatgtaacaaagcagggactcgccaaaagtatagcgaccatgatgtttgttctggcgaattcccaaaacatcaatccaaatccggaacagttagcaaaagatgcacaggacattgttgaattcgatcatgttcttgccatgaaatacagcaccgacgacacgacaagacgaagcttcgagcgaaatttcaatccgatgacaattcgacaacttatgaacagctatccaaagatctcctggcctatgttcattgcggaggccagccagctcgccccacatgtgaccaaacgattgctagagaatccaaaatatcaatacatcgttatggagccagagaagctccagcagctcagcgatgatcttggaaatcccgactttgtgtcaactcgtactctggtcaactacatctacttttccttgttcagacagtacaggagtttcttaccctggccgtcagtagttgacttccataaattccgttccgaaactccacccctcaccagacaacgacccataagaaaagtggaatggcgctacaaacgacagcagtacgactcgaaacaggcggctcagttcagttgtgctgcagagaccgtggagcagctaccgtatgcaaacgctcgcatgtttgtcgacaaggtttatgcaacggaacaatcacgaaagaagttacgagaagacgttggagaaatggtttccggcatattagtgggattccgctccatgattgatcagctgaactggatgacacccgcttcaaagctaggcgcgtataagaaaatcgaccaccttgtgaagaatattggctatcccgactggatcaccgacaatgagaagctgatcgaatctcacaaggggctcaacatcgatgtaaacagtgatgattacttcgcaatgttgagaaagattcgggaatggatgatagttggtttctggaactcgcttttcggccggccagcgggtcgcgaggatttcaatgcgcctcctggaatgacgaatgcttggtaccagccacaactcaactccatcacccttcctgtagccattcttcaccaacccttctacgacccaaccctacctactgctgtcaactatggagcgctgggagtaattgttgggcacgaactcactcatggcttcgacgaccaaggcgtgcaatgggacggtactggcgtcctcagcaattggatggacaactcgtccaccattggcttccgcgatatggccgactgcgtcgtgaaacagtacggcaatttctgcccgctagacaaaggaaaatacggaccagccgcgtgcttggacggtgacatgacccaaggcgagaacattgccgacaatggaggtattcgatcagctttccgtgcttatcgcaattacataaacctccacggtccggatccacagcttccagatgatctgttgcaggatttcacctctgatcagctattcttcttgagttttgctcagacctggtgtgaagtaggtcgcggtgaagctgcaatgttaagtcagctgctgagagacgttcattcgccatccaaataccgtgtctggggtacgatgcagaacttcccagccttcaaagacgcgttccactgcccgtccacgtcctacgcgcccgacaagcactgcaacgtttgggtgtcagagttggattcatcttacggtgagccagtggtaaagactgagctgaacataaggccaaataagcaaattactcccaatgaaaaggaagagtatgaagcctacaagaccgcagccgatttcttccaggcaaccgtcaatacttcagcagatccgtgcacagactttttccagtacgcttgcggtaaacacaataagccggtatcatttggtgttgctagagataaggtcaaccagcacatagccgatcaactctacagcgagcactatgacgctactatcaagagctcaactgccctcagcaaagccaaggtgttcacagacgcttgcgttgatgccacgaaggactcgtccaagaatcaggagatccttgccaccaagaactatctcttgccacgggtcaataaactagctgaataccttggctcaaagttcacgtacgtgtttggtggagaagtgagccggatgccagacaaaacacaactggccaacgcgctgggttatttatccttcgatcagggcatcgacacgcttatcacgccgatggtcgacacaaactggccggagcccaaaaaaggctactcaatgttccttgaccaaaactctgcgtacatgggcaaaacctactatgaaccgaacgccttcaaaaccatcaaggaaaactacgtcaattccgcaacgaaaatcatcgccacgttcgcaaaggctcaggatctgagtatcaacgagggggagctgaaggaaaacatccgaggtctaattgaattcgagcagttcattgcactcacatacagcagtgctgatgagcttcgtcgcacgttccagagatcgtggaatcttatgagtgttgatgatctcgggaagttcagctttgtggactggaaagcttacatgaagcaggtaccaaaagtcgcacaggaagtcgttcagaagagtacattcagagtctcagtgtacgagaaagagcagtacgagaaaatgtcagcggattattcgtctggtaaatgggataaaacgaagctggtcaactacctcttcatgcgattggtgcttcagaatgcacagtacctaccttcttatgctagcggttttgatgaaatgcctgaggaaccaatagtcctcggaagacgacgtccatatttccgcttcagaagaaatgataaccttgaagacgttgtagtcaactgcgcttctatggcaaataatctcatgcagtatgcaatcggacgagtgtacatcgactatgaatatcccaatgaggagaagaagaaattgatcagagaaacagccggaggcatgatgcagaatgtcatacattcgttccaaggaatgcttgattcactggactggatgacacaagagacgaaagtgaaagcctatgagaaaacaatggacatagtacaaaacatcgctttccccgactggatcatggataaccaaaagatcgacagctactatcaaggcttgtacttcaactcggctcaagagaactactatgacatgtggaccaagctaatagtattcaacattgaaattatctaccgacagcttacagcaaaggaggctgatcgacgtgatttcctcgcccaacctgcgacagtcaacgcttggtacatgcccgaactgaactccatcacatttcctgccggaatcctgcaaccgccatacttccaccctctttggcctacgtcagtaaagtacggaggactgggcgtgattgcaggacacgaactaattcacggtttcgacgatcaaggcgttcagtggggtcccagcggtgaaatgtcattccgcagttgccctgaatgcactggatggatggacaagaactctacagctggcttcaatgcgatggcgcaatgtgtcataaacgagtacggccagttttgtcctttggatcccagcaaattcactccaaactgtgtcaacggtgcactcactcaaggcgagaatattgctgacaatggaggaatccacgctgcattccgtgcctaccgaactcacattggcctgaacggccaggatcctcagcttcctgatcgtctgtttggacagttcaaccatgatcagctgttcttcttgagtttcgcccaggtatggtgtgaaaagcgacgccctgacgaccgactctaccaacagctgatggtcgacccgcattcaccggcgatgtaccgagtgttcggtactctgcagaactatccagcattcagggtggcctacaactgtccagccgagtctcgatatgcaccaaagaagcactgcaatgtttggaatcttgcgcttctcgtaagcggtcgtgtctctcgcctatgctcacccaaccacaccgaggaggaagatgcccgtttcaacacgctgttggctggcgttgaccgtatgccaggaagaacggatcggctgcacctgtacatgaaaaatgtccatccaatcgctaccggaattcgactggcggataaggagacagtaaggcccaaggacgtgcccggaagatggacaaagctgttcattggtgccgattcttcaagaatccttgctatatcaatggtgtatttgacattttggtatattctgtctacagactctcctctcactgaaacatga

SEQ ID NO: 537 - DNA, 4989 bp, Ancylostoma ceylanicum
  modified_base (217)..(217): a, c, t, g, unknown or other
atggagtggagcgctataaaggcaatgggcggtagtgagttgaatgtgcagcctccaaagcaaatagaatctggcaacgagaaatactccggatataagagcgttgctgaccttttcagagcatccttgaacataaaggttaatccatgtgaggacttctacaattacacctgcggaaacttcaaaggagatatgggattcgtagaatctgaagtgnattttagcttaccatttgttaatccatgtgaggacttctacaattacacctgcggaaacttcaaaggagatatgggattcgtagaatctgaagtggacaatataaagaaaatggctgagcaattaaataacgcgagttacataaagagcgcgcccgaaccagtcaagaccctggcagcgttctacgagaagtgcgtagcggcaagaatgaactgggacaatgtagtgaaagatgctaacattattatgaaagttatcaggcagttcgcagaaggtaacaaggactacccggatgagactcgattccccttttacatgttgtaccagaacgaaccagtcaaggagttccccactgctaggggtcttgcatacctgctggctaacccggctggtttgcatggtgccgctactctggtggcgccgttcgtggataccaactggaaggatcctcatggtaaaaatggctattcgttcttcatcgaccagccagtgacaatggtcccatacagcagccatgtgaaaacgtgggatgtaacaaagcagggactcgccaaaagtatagcgaccatgatgtttgttctggcgaattcccaaaacatcaatccaaatccggaacagttagcaaaagatgcacaggacattgttgaattcgatcatgttcttgccatgaaatacagcaccgacgacacgacaagacgaagcttcgagcgaaatttcaatccgatgacaattcgacaacttatgaacagctatccaaagatctcctggcctatgttcattgcggaggccagccagctcgccccacatgtgaccaaacgattgctagagaatccaaaatatcaatacatcgttatggagccagagaagctccagcagctcagcgatgatcttggaaatcccgactttgtgtcaactcgtactctggtcaactacatctacttttccttgttcagacagtacaggagtttcttaccctggccgtcagtagttgacttccataaattccgttccgaaactccacccctcaccagacaacgacccataagaaaagtggaatggcgctacaaacgacagcagtacgactcgaaacaggcggctcagttcagttgtgctgcagagaccgtggagcagctaccgtatgcaaacgctcgcatgtttgtcgacaaggtttatgcaacggaacaatcacgaaagaagttacgagaagacgttggagaaatggtttccggcatattagtgggattccgctccatgattgatcagctgaactggatgacacccgcttcaaagctaggcgcgtataagaaaatcgaccaccttgtgaagaatattggctatcccgactggatcaccgacaatgagaagctgatcgaatctcacaaggggctcaacatcgatgtaaacagtgatgattacttcgcaatgttgagaaagattcgggaatggatgatagttggtttctggaactcgcttttcggccggccagcgggtcgcgaggatttcaatgcgcctcctggaatgacgaatgcttggtaccagccacaactcaactccatcacccttcctgtagccattcttcaccaacccttctacgacccaaccctacctactgctgtcaactatggagcgctgggagtaattgttgggcacgaactcactcatggcttcgacgaccaaggcgtgcaatgggacggtactggcgtcctcagcaattggatggacaactcgtccaccattggcttccgcgatatggccgactgcgtcgtgaaacagtacggcaatttctgcccgctagacaaaggaaaatacggaccagccgcgtgcttggacggtgacatgacccaaggcgagaacattgccgacaatggaggtattcgatcagctttccgtgcttatcgcaattacataaacctccacggtccggatccacagcttccagatgatctgttgcaggatttcacctctgatcagctattcttcttgagttttgctcagacctggtgtgaagtaggtcgcggtgaagctgcaatgttaagtcagctgctgagagacgttcattcgccatccaaataccgtgtctggggtacgatgcagaacttcccagccttcaaagacgcgttccactgcccgtccacgtcctacgcgcccgacaagcactgcaacgtttgggtgtcagagttggattcatcttacggtgagccagtggtaaagactgagctgaacataaggccaaataagcaaattactcccaatgaaaaggaagagtatgaagcctacaagaccgcagccgatttcttccaggcaaccgtcaatacttcagcagatccgtgcacagactttttccagtacgcttgcggtaaacacaataagccggtatcatttggtgttgctagagataaggtcaaccagcacatagccgatcaactctacagcgagcactatgacgctactatcaagagctcaactgccctcagcaaagccaaggtgttcacagacgcttgcgttgatgccacgaaggactcgtccaagaatcaggagatccttgccaccaagaactatctcttgccacgggtcaataaactagctgaataccttggctcaaagttcacgtacgtgtttggtggagaagtgagccggatgccagacaaaacacaactggccaacgcgctgggttatttatccttcgatcagggcatcgacacgcttatcacgccgatggtcgacacaaactggccggagcccaaaaaaggctactcaatgttccttgaccaaaactctgcgtacatgggcaaaacctactatgaaccgaacgccttcaaaaccatcaaggaaaactacgtcaattccgcaacgaaaatcatcgccacgttcgcaaaggctcaggatctgagtatcaacgagggggagctgaaggaaaacatccgaggtctaattgaattcgagcagttcattgcactcacatacagcagtgctgatgagcttcgtcgcacgttccagagatcgtggaatcttatgagtgttgatgatctcgggaagttcagctttgtggactggaaagcttacatgaagcaggtaccaaaagtcgcacaggaagtcgttcagaagagtacattcagagtctcagtgtacgagaaagagcagtacgagaaaatgtcagcggattattcgtctggtaaatgggataaaacgaagctggtcaactacctcttcatgcgattggtgcttcagaatgcacagtacctaccttcttatgctagcggttttgatgaaatgcctgaggaaccaatagtcctcggaagacgacgtccatatttccgcttcagaagaaatgataaccttgaagacgttgtagtcaactgcgcttctatggcaaataatctcatgcagtatgcaatcggacgagtgtacatcgactatgaatatcccaatgaggagaagaagaaattgatcagagaaacagccggaggcatgatgcagaatgtcatacattcgttccaaggaatgcttgattcactggactggatgacacaagagacgaaagtgaaagcctatgagaaaacaatggacatagtacaaaacatcgctttccccgactggatcatggataaccaaaagatcgacagctactatcaaggcttgtacttcaactcggctcaagagaactactatgacatgtggaccaagctaatagtattcaacattgaaattatctaccgacagcttacagcaaaggaggctgatcgacgtgatttcctcgcccaacctgcgacagtcaacgcttggtacatgcccgaactgaactccatcacatttcctgccggaatcctgcaaccgccatacttccaccctctttggcctacgtcagtaaagtacggaggactgggcgtgattgcaggacacgaactaattcacggtttcgacgatcaaggcgttcagtggggtcccagcggtgaaatgtcattccgcagttgccctgaatgcactggatggatggacaagaactctacagctggcttcaatgcgatggcgcaatgtgtcataaacgagtacggccagttttgtcctttggatcccagcaaattcactccaaactgtgtcaacggtgcactcactcaaggcgagaatattgctgacaatggaggaatccacgctgcattccgtgcctaccgaactcacattggcctgaacggccaggatcctcagcttcctgatcgtctgtttggacagttcaaccatgatcagctgttcttcttgagtttcgcccaggtatggtgtgaaaagcgacgccctgacgaccgactctaccaacagctgatggtcgacccgcattcaccggcgatgtaccgagtgttcggtactctgcagaactatccagcattcagggtggcctacaactgtccagccgagtctcgatatgcaccaaagaagcactgcaatgtttggaatcttgcgcttctcgtaagcggtcgtgtctctcgcctatgctcacccaaccacaccgaggaggaagatgcccgtttcaacacgctgttggctggcgttgaccgtatgccaggaagaacggatcggctgcacctgtacatgaaaaatgtccatccaatcgctaccggaattcgactggcggataaggagacagtaaggcccaaggacgtgcccggaagatggacaaagctgttcattggtgccgattcttcaagaatccttgctatatcaatggtgtatttgacattttggtatattctgtctacagactctcctctcactgaaacatga

SEQ ID NO: 538 - DNA, 2547 bp, Ancylostoma ceylanicum
atggaactcgaacaggcgccggacacacaagtgcttgagctaagccaacgcgtgaaattgctgggtcagccgcatgcagaatcaaaacaagcatatggcgatgtcgactatgcagaacttgaggaatgggacccgcacatcctccttgccgtggccaaagcaaagctatcccgaggcaaaggaaagagtaccacatacgggggtcaccgtgctcaggaaaaagaaagttttcggagattcattaactccttcttggtgaaatatccaaggaagctgtgggatgataggagcctcatcctcctgtttgagcggttgttaaagaaagatgcactgatgattttcgaaaccctgccaacatcagtgaggtcaggaacctttgatgaagtggtagaagccatgagggctaggttatgcgaggacaacaacagcgctcgattgaaagcaatgacggccctgcggaagcttacaatgagggaagggcagtcggtagctgaattctgcctggtgctggagagagtagcaagtcgggcttaccccgatacaccaccagaggcagtctcgctgcagaaggctgagatcctgttcaatcagttagccaggtgggaaggtagctacactttagcggacgccttagagaccagtgctaaagaggaagtctacgaaaaggtgaaggagacagctcttcgcctagagcgtacaagaaggacagcgaatgagatggcacaagaccgagttgcacgaagaactccgttgacccgcccaggtgagcagcgaggtgatagcggaagctcgtatgcgccagaagcaagtggcttatgggaaacttcgagcaatgaaggaagtcaagtgacagatgatgaagtagtggaagaaaggctagctaagtcccagaaagaggtaaaatgcttcaagtgtggtaaagttgggcacatagcaaggcactgtaccgcacctaaggtatccctaagagcagaaaaggcagtttccggaagaccgttagcaaaggaatcacaagagatcggatcattttcagctctccttgacaagcttctatgcacaactagtaggtgcgctgaatttgtgcagtcggaaggtctgttcggagagaaatcagtggttccagtaaaaatgatggggatagagcttgtcgctttgctggatacaggctcagaaacttcgataattcccctgaatgtatttcacatagcgctagaaaagaaagtggacgttgatcggtacgtcaagagaatccctagagtggaggccatcgttcgtaacgcatcgggtgaacgaatgagcttcgttgacacaattaagatggaagtaactatgaaaggtgagactaaacccatagccttccatgtgggagaaggcctcgacgatatagtcatcctaggtacaaacgctctggaagcctttgggctagagttacgtaaggtgaagcaagcgaggctggaaaaacaactgaataaggatgacgaagatactagtatggaatcaagagcacaaaagagagtgttcttagtatcagggtgcatgaaatgccacccaaacgagagagctatgaaacgaagagctgttttgcccgtgacaagatatacggttccgtcacctagatttcgcaaaaatcccgcagagagcctgagtgccataaggaccactgtgagagcacagccgacgctaattacggaaggaagagtgggttacagaagccagcatgagcttgcgactcgcgtggctatgaagggacagcgtagtaggatgaagagatcgctaatggaagaagccgtcaagtgtgctaaaaagtcaacgttggttttccttccgtttggattccgagggttcaagcgcattgttgctgctactgagaatgtaagggtgtgtctgtacaagacattggctgatgtctgtgagagattgaaaagagaatcagcattgtacgcgtgtgtttttgtgtcgccaacgacagtgagaccaattgaggaaaacttctggctacagctatatgcagcgctctctgcgcaagtgagtcaaggcacgaaagtgatcgcggtttgtggacccagaggggaaaaggcatgggaacaaaaccgccacaagacaataaagatgtttgagctcatgcgtggggcagcaacagcagcaactcgacacaatgttgttacgatgttcgggaaagagcctgctttcaaggaaccgtgcgtgacgatgggaatagccccaagaaaaaaagctagtgacggataccccgttcacctgatgaaggagtttctagtagcactgcaagcatacatagctgaacatatagaaaatcagctgtttaaagtgtatgggaagacggtcagcaccaataaggcaaacgagtatagagagcgttgtgagccagaacatgcgtgtcaggtgctgagatcagttggaatgaccgaaaacgaatcttttcaggaaagcaaccatttgggtacacatggaatgcatatacaaggatcgagacgacccgatcgcttgagatacaggatactaccaccgtcgagaaaagaagccgcgtga

SEQ ID NO: 539 - DNA, 2487 bp, Ancylostoma ceylanicum
atggaactcgaacaggcgccggacacacaagtgcttgagctaagccaacgcgtgaaattgctgggtcagccgcatgcagaatcaaaacaagcatatggcgatgtcgactatgcagaacttgaggaatgggacccgcacatcctccttgccgtggccaaagcaaagctatcccgaggcaaaggaaagagtaccacatacgggggtcaccggaagctgtgggatgataggagcctcatcctcctgtttgagcggttgttaaagaaagatgcactgatgattttcgaaaccctgccaacatcagtgaggtcaggaacctttgatgaagtggtagaagccatgagggctaggttatgcgaggacaacaacagcgctcgattgaaagcaatgacggccctgcggaagcttacaatgagggaagggcagtcggtagctgaattctgcctggtgctggagagagtagcaagtcgggcttaccccgatacaccaccagaggcagtctcgctgcagaaggctgagatcctgttcaatcagttagccaggtgggaaggtagctacactttagcggacgccttagagaccagtgctaaagaggaagtctacgaaaaggtgaaggagacagctcttcgcctagagcgtacaagaaggacagcgaatgagatggcacaagaccgagttgcacgaagaactccgttgacccgcccaggtgagcagcgaggtgatagcggaagctcgtatgcgccagaagcaagtggcttatgggaaacttcgagcaatgaaggaagtcaagtgacagatgatgaagtagtggaagaaaggctagctaagtcccagaaagaggtaaaatgcttcaagtgtggtaaagttgggcacatagcaaggcactgtaccgcacctaaggtatccctaagagcagaaaaggcagtttccggaagaccgttagcaaaggaatcacaagagatcggatcattttcagctctccttgacaagcttctatgcacaactagtaggtgcgctgaatttgtgcagtcggaaggtctgttcggagagaaatcagtggttccagtaaaaatgatggggatagagcttgtcgctttgctggatacaggctcagaaacttcgataattcccctgaatgtatttcacatagcgctagaaaagaaagtggacgttgatcggtacgtcaagagaatccctagagtggaggccatcgttcgtaacgcatcgggtgaacgaatgagcttcgttgacacaattaagatggaagtaactatgaaaggtgagactaaacccatagccttccatgtgggagaaggcctcgacgatatagtcatcctaggtacaaacgctctggaagcctttgggctagagttacgtaaggtgaagcaagcgaggctggaaaaacaactgaataaggatgacgaagatactagtatggaatcaagagcacaaaagagagtgttcttagtatcagggtgcatgaaatgccacccaaacgagagagctatgaaacgaagagctgttttgcccgtgacaagatatacggttccgtcacctagatttcgcaaaaatcccgcagagagcctgagtgccataaggaccactgtgagagcacagccgacgctaattacggaaggaagagtgggttacagaagccagcatgagcttgcgactcgcgtggctatgaagggacagcgtagtaggatgaagagatcgctaatggaagaagccgtcaagtgtgctaaaaagtcaacgttggttttccttccgtttggattccgagggttcaagcgcattgttgctgctactgagaatgtaagggtgtgtctgtacaagacattggctgatgtctgtgagagattgaaaagagaatcagcattgtacgcgtgtgtttttgtgtcgccaacgacagtgagaccaattgaggaaaacttctggctacagctatatgcagcgctctctgcgcaagtgagtcaaggcacgaaagtgatcgcggtttgtggacccagaggggaaaaggcatgggaacaaaaccgccacaagacaataaagatgtttgagctcatgcgtggggcagcaacagcagcaactcgacacaatgttgttacgatgttcgggaaagagcctgctttcaaggaaccgtgcgtgacgatgggaatagccccaagaaaaaaagctagtgacggataccccgttcacctgatgaaggagtttctagtagcactgcaagcatacatagctgaacatatagaaaatcagctgtttaaagtgtatgggaagacggtcagcaccaataaggcaaacgagtatagagagcgttgtgagccagaacatgcgtgtcaggtgctgagatcagttggaatgaccgaaaacgaatcttttcaggaaagcaaccatttgggtacacatggaatgcatatacaaggatcgagacgacccgatcgcttgagatacaggatactaccaccgtcgagaaaagaagccgcgtga

SEQ ID NO: 540 - DNA, 1200 bp, Ancylostoma ceylanicum
atgcgctttttagcgctactagcggcatgtgccgtggtagccgctgcagaggccgtagatccttgcaagcgacaaccgttccgtggcagatgtccgtcgaaggacggcgagactccgaagcgttcacagtttgtgctgcgctactacatgcgaaacggtgaatgtgtcagctacccctacggtcattgcgcatctgatgagacggaaccccagctgtaccggtacaaggaggaatgcgaggatgcctgtatcaatccgcctcccgccaacctgggtttcccaaaaggctcggaattcgaccagacctacggcactgtcggccctatcgctggcgagtcccagacacaggcagccaccgagaaggttgacattactaccgaaaccaccacaacacaggttgttaccacgacgccgttagagacgaccacaacagtggagtcaaccacaacatcagaagctacgacaacaaccaccgcgcctacaacaaccacgactgaagagccctccacgacatccgaagcgcctacaacggcgaccgtcactgaagctccagtatcgacaactgagaccacgactaccagtgaaattccaagcacaattgacagctcgaccacttcgaccacggaagcacctacgactacctcagaattacccacaaccactgagtcatccacaacacctagcacaaccaccagacgaaccatcgtctcaccgtcctcctcaagcaccagagaacgaacgtcgattgttcaggctgacaccacccacaggtcctcaacatctcaagcaccgaccacggcagcgccgaggacagaatgcgaacgtcgtcgtgtcaacgccgcctcatccacaataagaggagcattcgtgcctgcctgcaccgctcaaggcgcttttgagaaagtccagtgcgaacctgacggtcgccagtgcttctgcgtggattcgcgaggaattgaaatcccgaacagccgcacccgaaacgggcagaagccagactgtgacagagtattcctcccacgctgtgacctagagggcttctatcgtcccgaacagtgtcacaacggctactgctggtgtgtggaccgatacggtcgcgagttcgaccactcccgcaccaaaggagaacttccggactgtggacagtactccaatgaattggatgaagaggagaaagtcgacctgaaacatcgtctctaa

What is claimed:

1. A nucleic acid comprising:
a nucleotide sequence encoding an amino acid sequence comprising at least 10 consecutive amino acids encoded by an open reading frame in any one of SEQ ID NOS:1-540; and
a promoter operably linked to the nucleotide sequence, wherein the promoter is not a hookworm promoter.

2. The nucleic acid of claim 1, wherein the amino acid sequence has at least about 95% sequence homology with an amino acid sequence comprising at least 20 consecutive amino acids encoded by an open reading frame in any one of SEQ ID NOS:1-540.

3. The nucleic acid of claim 2, wherein the amino acid sequence comprises an amino acid sequence having at least 95% sequence homology with an amino acid sequence encoded by any one of SEQ ID NOS:1-540.

4. The nucleic acid of claim 1, wherein the promoter can drive the transcription of the nucleotide sequence in a bacterium, yeast, fungal cell, plant cell, insect cell, or mammalian cell.

5. The nucleic acid of claim 4, wherein the promoter can drive transcription of the nucleotide sequence in Escherichia coli, Bacillus subtilis, Pseudomonas fluorescens, Leishmania tarentolae, Saccharomyces cerevisiae, Pichia Pastoris, Nicotiana, Drosophila melanogaster, Spodoptera frugiperda, Trichoplusia ni, Gallus gallus, Mus musculus, Sus scrofa, Ovis aries, Capra aegagrus, Bos taurus, Sf9 cells, Sf21 cells, Schneider 2 cells, Schneider 3 cells, High Five cells, NS0 cells, Chinese Hamster Ovary (“CHO”) cells, Baby Hamster Kidney cells, COS cells, Vero cells, HeLa cells, or HEK 293 cells.

6. The nucleic acid of claim 5, wherein the promoter can drive transcription of the nucleotide sequence in Escherichia coli, Saccharomyces cerevisiae, or CHO cells.

7. A method for transfecting a cell, comprising transfecting a cell with the nucleic acid claim 1.

8. The method of claim 7, wherein the cell is selected from Escherichia coli, Bacillus subtilis, Pseudomonas fluorescens, Leishmania tarentolae, Saccharomyces cerevisiae, Pichia Pastoris, Nicotiana, Drosophila melanogaster, Spodoptera frugiperda, Trichoplusia ni, Gallus gallus, Mus musculus, Sus scrofa, Ovis aries, Capra aegagrus, Bos taurus, Sf9 cells, Sf21 cells, Schneider 2 cells, Schneider 3 cells, High Five cells, NS0 cells, Chinese Hamster Ovary (“CHO”) cells, Baby Hamster Kidney cells, COS cells, Vero cells, HeLa cells, and HEK 293 cells.

9. A cell comprising the nucleic acid of claim 1.

10. The cell of claim 9, wherein the cell is selected from Escherichia coli, Bacillus subtilis, Pseudomonas fluorescens, Leishmania tarentolae, Saccharomyces cerevisiae, Pichia Pastoris, Nicotiana, Drosophila melanogaster, Spodoptera frugiperda, Trichoplusia ni, Gallus gallus, Mus musculus, Sus scrofa, Ovis aries, Capra aegagrus, Bos taurus, Sf9 cells, Sf21 cells, Schneider 2 cells, Schneider 3 cells, High Five cells, NS0 cells, Chinese Hamster Ovary (“CHO”) cells, Baby Hamster Kidney cells, COS cells, Vero cells, HeLa cells, and HEK 293 cells.

11. A method for producing an antigen, comprising incubating the cell of claim 9 under conditions sufficient to express the nucleotide sequence, thereby producing the antigen.

12. A method for preventing or treating a hookworm infection in a subject, comprising administering to the subject a composition comprising either an antigen or a nucleic acid encoding the antigen, wherein the antigen comprises an amino acid sequence comprising at least 10 consecutive amino acids encoded by an open reading frame in any one of SEQ ID NOS:1-540.

13. The method of claim 12, wherein the amino acid sequence has at least about 95% sequence homology with an amino acid sequence comprising at least 20 consecutive amino acids encoded by an open reading frame in any one of SEQ ID NOS:1-540.

14. The method of claim 13, wherein the amino acid sequence comprises an amino acid sequence having at least 95% sequence homology with an amino acid sequence encoded by any one of SEQ ID NOS:1-540.

15. The method of claim 12, wherein the subject is selected from murines, felines, canines, ovines, porcines, bovines, equines, and primates.

16. The method of claim 15, wherein the subject is selected from Felis catus, Canis lupus familiaris, and Homo sapiens.

17. A method for modulating an immune response in a subject, comprising administering to the subject a composition comprising either:
a peptide or protein; or
a nucleic acid encoding the peptide or protein;
wherein the peptide or protein comprises an amino acid sequence comprising at least 10 consecutive amino acids encoded by an open reading frame in any one of SEQ ID NOS:1-203 and SEQ ID NOS:405-540.

18. The method of claim 17, wherein administering the composition to the subject decreases an immune response in the subject.

19. The method of claim 17, wherein the subject is selected from murines, felines, canines, ovines, porcines, bovines, equines, and primates.

20. The method of claim 19, wherein the subject is selected from Homo sapiens and Mus musculus.

21. A peptide or protein comprising an amino acid sequence comprising at least 10 consecutive amino acids encoded by an open reading frame in any one of SEQ ID NOS:1-540.

22. The peptide or protein of claim 21, wherein the amino acid sequence has at least about 95% sequence homology with an amino acid sequence comprising at least 20 consecutive amino acids encoded by an open reading frame in any one of SEQ ID NOS:1-540.

23. The peptide or protein of claim 22, wherein the amino acid sequence comprises an amino acid sequence having at least 95% sequence homology with an amino acid sequence encoded by any one of SEQ ID NOS:1-540.

24. A sterile, injectable pharmaceutical composition, comprising the peptide or protein of claim 21.
